(19) United States
(12) Patent Application Publication
(10) Pub. No.: US 2025/0011776 A1
(43) Pub. Date: Jan. 9, 2025

(54) HUNTINGTIN (HTT) IRNA AGENT COMPOSITIONS AND METHODS OF USE THEREOF

(71) Applicant: Alnylam Pharmaceuticals, Inc., Cambridge, MA (US)

(72) Inventors: William Cantley, Brighton, MA (US); James D. Mclninch, Burlington, MA (US); Mark K. Schlegel, Boston, MA (US); Adam Castoreno, Framingham, MA (US); Bret Lee Bostwick, Cambridge, MA (US)

(21) Appl. No.: 18/631,105

(22) Filed: Apr. 10, 2024

Related U.S. Application Data
(63) Continuation of application No. PCT/US2022/047986, filed on Oct. 27, 2022.
(60) Provisional application No. 63/285,550, filed on Dec. 3, 2021.
(60) Provisional application No. 63/273,200, filed on Oct. 29, 2021.

(51) Int. Cl. C12N 15/113; A61P 25/28

(52) U.S. Cl. CPC C12N 15/113; A61P 25/28; C12N 2310/11; C12N 2310/14; C12N 2310/315; C12N 2310/3515

(57) ABSTRACT

The disclosure relates to double stranded ribonucleic acid (dsRNAi) agents and compositions targeting a Huntingtin (HTT) gene, as well as methods of inhibiting expression of an HTT gene and methods of treating subjects having an HTT-associated disease or disorder, e.g., Huntington's disease, using such dsRNAi agents and compositions.

### RELATED APPLICATIONS

[0001] This application is a 35 § U.S.C. 111(a) continuation application which claims the benefit of priority to PCT/US2022/047986, filed on Oct. 27, 2022, which, in turn, claims the benefit of priority to U.S. Provisional Application No. 63/273,200, filed on Oct. 29, 2021, and U.S. Provisional Application No. 63/285,550, filed on Dec. 3, 2021. The entire contents of each of the foregoing applications are incorporated herein by reference.

### SEQUENCE LISTING

[0002] The instant application contains a Sequence Listing which has been submitted electronically in XML file format and is hereby incorporated by reference in its entirety. Said XML copy, created on Mar. 29, 2024, is named 121301_16903_SL.xml and is 13,281,762 bytes in size.

### BACKGROUND OF THE INVENTION

[0003] Huntington's disease is a progressive neurodegenerative disorder characterized by motor disturbance, cognitive loss and psychiatric manifestations (Martin and Gusella (1986) N. Engl. J. Med. 315:1267-1276). It is inherited in an autosomal dominant fashion, and affects about 1/10,000 individuals in most populations of European origin (Harper, P. S. et al., in Huntington's Disease, W. B. Saunders, Philadelphia, 1991). The hallmark of Huntington's disease is a distinctive choreic movement disorder that typically has a subtle, insidious onset in the fourth to fifth decade of life and gradually worsens over a course of 10 to 20 years until death. Occasionally, Huntington's disease is expressed in juveniles typically manifesting with more severe symptoms including rigidity and a more rapid course. Juvenile onset of Huntington's disease is associated with a preponderance of paternal transmission of the disease allele. The neuropathology of Huntington's disease also displays a distinctive pattern, with selective loss of neurons that is most severe in the caudate and putamen regions of the brain.

[0004] Huntington's disease has been shown to be caused by an expanding glutamine repeat in exon 1 of a gene termed IT15 or Huntingtin (HTT). Although this gene is widely expressed and is required for normal development, the pathology of Huntington's disease is restricted to the brain, for reasons that remain poorly understood. In patients having HD (an autosomal dominant disease), the expansion of the polyglutamine repeat results in a full-length mutant transcript encoding an expanded polyglutamine repeat, as well as a truncated mutant transcript which retains intron 1 and encodes an expanded polyglutamine repeat. The other allele produces a wild-type transcript. It has been shown that, although the Huntingtin gene product is expressed at similar levels in patients and controls, it is the expansion of the polyglutamine repeat and the presence of the full-length mutant transcript and the truncated mutant transcript that induces toxicity.

[0005] Effective treatment for Huntington's disease is currently not available. The choreic movements and agitated behaviors may be suppressed, usually only partially, by antipsychotics (e.g., chlorpromazine) or reserpine until adverse effects of lethargy, hypotension, or parkinsonism occur. In addition, despite significant advances in the field of RNAi and Huntington's disease treatment, there remains a need for an agent that can selectively and efficiently silence the HD gene using the cell's own RNAi machinery that has both high biological activity and in vivo stability, and that can effectively inhibit expression of a target Huntingtin gene.

### BRIEF SUMMARY OF THE INVENTION

[0006] The present disclosure provides RNAi agent compositions which effect the RNA-induced silencing complex (RISC)-mediated cleavage of RNA transcripts of a mutant huntingin (HTT) gene. In particular, the RNAi agent compositions of the invention target intron 1 retained in the truncated mutant HTT gene, thereby inhibiting expression of the truncated mutant HTT transcript encoding an expanded polyglutamine repeat while sparing full-length wild-type HTT. The HTT gene may be within a cell, e.g., a cell within a subject, such as a human. The present disclosure also provides methods of using the RNAi agent compositions of the disclosure for inhibiting the expression of an HTT gene or for treating a subject who would benefit from inhibiting or reducing the expression of an HTT gene, e.g., a subject suffering or prone to suffering from an HTT-associated disease.

[0007] In one aspect, the present invention provides a double stranded ribonucleic acid (dsRNA) agent for inhibiting expression of Huntingtin (HTT), in a cell, wherein the dsRNA comprises a sense strand and an antisense strand forming a double stranded region, wherein the antisense strand comprises a region of complementarity to intron 1 retained in mutant HTT mRNA, and wherein the region of complementarity comprises at least 15 contiguous nucleotides differing by no more than 3, e.g., 3, 2, 1, or 0. nucleotides from any one of the antisense nucleotide sequences in any one of Tables 2-3 and 5-6.

[0008] In one embodiment, the dsRNA agent comprises a sense strand comprising a contiguous nucleotide sequence which has at least 85%, e.g., 85%, 90%, 91%, 92%, 93%, 94%, 95%, 96%, 97%, 98%, 99%, or 100%, nucleotide sequence identity over its entire length to any one of the nucleotide sequences of the sense strands in any one of Tables 2-3 and 5-6 and an antisense strand comprising a contiguous nucleotide sequence which has at least 85%, e.g., 85%, 90%, 91%, 92%, 93%, 94%, 95%, 96%, 97%, 98%, 99%, or 100%, nucleotide sequence identity over its entire length to any one of the nucleotide sequences of the antisense strands in any one of Tables 2-3 and 5-6.

[0009] In one embodiment, the dsRNA agent comprises a sense strand comprising at least 15, e.g., 15, 16, 17, 18, 19, 20, or 21, contiguous nucleotides differing by no more than three nucleotides from any one of the nucleotide sequences of the sense strands in any one of Tables 2-3 and 5-6 and an antisense strand comprising at least 15, e.g., 15, 16, 17, 18, 19, 20, 21, 22, or 23, contiguous nucleotides differing by no more than three nucleotides from any one of the nucleotide sequences of the antisense strands in any one of Tables 2-3 and 5-6.

[0010] In one embodiment, the dsRNA agent comprises a sense strand comprising at least 15, e.g., 15, 16, 17, 18, 19, 20, or 21, contiguous nucleotides differing by no more than two nucleotides from any one of the nucleotide sequences of the sense strands in any one of Tables 2-3 and 5-6 and an antisense strand comprising at least 15, e.g., 15, 16, 17, 18, 19, 20, 21, 22, or 23, contiguous nucleotides differing by no more than two nucleotides from any one of the nucleotide sequences of the antisense strands in any one of Tables 2-3 and 5-6.

[0011] In one embodiment, the dsRNA agent comprises a sense strand comprising at least 15, e.g., 15, 16, 17, 18, 19, 20, or 21, contiguous nucleotides differing by no more than one nucleotide from any one of the nucleotide sequences of the sense strands in any one of Tables 2-3 and 5-6 and an antisense strand comprising at least 15, e.g., 15, 16, 17, 18, 19, 20, 21, 22, or 23, contiguous nucleotides differing by no more than one nucleotide from any one of the nucleotide sequences of the antisense strands in any one of Tables 2-3 and 5-6.

[0012] In one embodiment, the dsRNA agent comprises a sense strand comprising or consisting of a nucleotide sequence selected from the group consisting of any one of the nucleotide sequences of the sense strands in any one of Tables 2-3 and 5-6 and an antisense strand comprising or consisting of a nucleotide sequence selected from the group consisting of any one of the nucleotide sequences of the antisense strands in any one of Tables 2-3 and 5-6.

[0013] In one embodiment, the sense strand comprises at least 15, e.g., 15, 16, 17, 18, 19, 20, or 21, contiguous nucleotides differing by no more than three nucleotides from any one of the nucleotide sequence of nucleotides 5790-5810; 5791-5811; 5924-5944; 5925-5945; 5998-6018; 6063-6083; 6064-6084; 6194-6214; 6195-6215; or 6211-6231 of SEQ ID NO:11.

[0014] In one embodiment, the sense strand comprises at least 15, e.g., 15, 16, 17, 18, 19, 20, or 21, contiguous nucleotides differing by no more than three nucleotides from any one of the nucleotide sequences of nucleotides 5790-5810; 5791-5811; 5924-5944; 6064-6084; or 6194-6214 of SEQ ID NO:11.

[0015] In one embodiment, the antisense strand comprises at least 15, e.g., 15, 16, 17, 18, 19, 20, 21, 22, or 23, contiguous nucleotides differing by no more that three nucleotides from any one of the antisense strand nucleotide sequences of a duplex selected from the group consisting of AD-1640384; AD-1640458; AD-1640457; AD-1640461; AD-1640628; AD-1640629; AD-1640498; AD-1640651; AD-1640631; AD-1640497; AD-1640382; or AD-1640467.

[0016] In one embodiment, the antisense strand comprises at least 15, e.g., 15, 16, 17, 18, 19, 20, 21, 22, or 23, contiguous nucleotides differing by no more that three nucleotides from any one of the antisense strand nucleotide sequences of a duplex selected from the group consisting of AD-1640384; AD-1640458; AD-1640457; AD-1640628; AD-1640629; AD-1640498; or AD-1640382.

[0017] In one aspect, the present invention provides a double stranded ribonucleic acid (dsRNA) agent for inhibiting expression of Huntingtin (HTT) in a cell, wherein the dsRNA comprises a sense strand and an antisense strand forming a double stranded region, wherein the antisense strand comprises at least 15, e.g., 15, 16, 17, 18, 19, 20, 21, 22, or 23, contiguous nucleotides differing by no more that three nucleotides from any one of the nucleotide sequences of nucleotides 5922-5944, 6059-6106; 6059-6084; 6068-6092; 6076-6106; 6191-6231; 6191-6215; 6191-6214; 6192-6215; 6198-6231; or 6198-6224 of SEQ ID NO:11.

[0018] In another aspect, the present invention provides a double stranded ribonucleic acid (dsRNA) agent for inhibiting expression of Huntingtin (HTT) in a cell, wherein the dsRNA comprises a sense strand and an antisense strand forming a double stranded region, wherein the antisense strand comprises at least 15, e.g., 15, 16, 17, 18, 19, 20, 21, 22, or 23, contiguous nucleotides differing by no more that three nucleotides from any one of the antisense strand nucleotide sequences of a duplex selected from the group consisting of AD-1718647; AD-1718648; AD-1718649; AD-1718653; AD-1718654 AD-1718655; AD-1718656; AD-1718660; AD-1718662; AD-1718663; AD-1718669; AD-1718670; AD-1718673; AD-1718674; AD-1718676; AD-1718677; AD-1718678; AD-1718679; AD-1718680; AD-1718682; AD-1718683; AD-1718702; AD-1718715; AD-1718717; or AD-1718721.

[0019] In some embodiments, the dsRNA agent comprises a sense strand comprising at least 15, e.g., 15, 16, 17, 18, 19, 20, or 21, contiguous nucleotides differing by no more than three nucleotides from any one of the sense strand nucleotide sequences of a duplex selected from the group consisting of AD-1718647; AD-1718648; AD-1718649; AD-1718653; AD-1718654 AD-1718655; AD-1718656; AD-1718660; AD-1718662; AD-1718663; AD-1718669; AD-1718670; AD-1718673; AD-1718674; AD-1718676; AD-1718677; AD-1718678; AD-1718679; AD-1718680; AD-1718682; AD-1718683; AD-1718702; AD-1718715; AD-1718717; or AD-1718721, and an antisense strand comprising at least 15, e.g., 15, 16, 17, 18, 19, 20, 21, 22, or 23, contiguous nucleotides differing by no more than three nucleotides from any one of the antisense strand nucleotide sequences of a duplex selected from the group consisting of AD-1718647; AD-1718648; AD-1718649; AD-1718653; AD-1718654 AD-1718655; AD-1718656; AD-1718660; AD-1718662; AD-1718663; AD-1718669; AD-1718670; AD-1718673; AD-1718674; AD-1718676; AD-1718677; AD-1718678; AD-1718679; AD-1718680; AD-1718682; AD-1718683; AD-1718702; AD-1718715; AD-1718717; or AD-1718721.

[0020] In some embodiments, the dsRNA agent comprises a sense strand comprising at least 15, e.g., 15, 16, 17, 18, 19, 20, or 21, contiguous nucleotides differing by no more than two nucleotides from any one of the sense strand nucleotide sequences of a duplex selected from the group consisting of AD-1718647; AD-1718648; AD-1718649; AD-1718653; AD-1718654 AD-1718655; AD-1718656; AD-1718660; AD-1718662; AD-1718663; AD-1718669; AD-1718670; AD-1718673; AD-1718674; AD-1718676; AD-1718677; AD-1718678; AD-1718679; AD-1718680; AD-1718682; AD-1718683; AD-1718702; AD-1718715; AD-1718717; or AD-1718721, and an antisense strand comprising at least 15, e.g., 15, 16, 17, 18, 19, 20, 21, 22, or 23, contiguous nucleotides differing by no more than two nucleotides from any one of the antisense strand nucleotide sequences of a duplex selected from the group consisting of AD-1718647; AD-1718648; AD-1718649; AD-1718653; AD-1718654 AD-1718655; AD-1718656; AD-1718660; AD-1718662; AD-1718663; AD-1718669; AD-1718670; AD-1718673; AD-1718674; AD-1718676; AD-1718677; AD-1718678; AD-1718679; AD-1718680; AD-1718682; AD-1718683; AD-1718702; AD-1718715; AD-1718717; or AD-1718721.

[0021] In some embodiments, the dsRNA agent comprises a sense strand comprising at least 15, e.g., 15, 16, 17, 18, 19, 20, or 21, contiguous nucleotides differing by no more than one nucleotide from any one of the sense strand nucleotide sequences of a duplex selected from the group consisting of AD-1718647; AD-1718648; AD-1718649; AD-1718653; AD-1718654 AD-1718655; AD-1718656; AD-1718660; AD-1718662; AD-1718663; AD-1718669; AD-1718670; AD-1718673; AD-1718674; AD-1718676; AD-1718677; AD-1718678; AD-1718679; AD-1718680; AD-1718682; AD-1718683; AD-1718702; AD-1718715; AD-1718717; or AD-1718721, and an antisense strand comprising at least 15, e.g., 15, 16, 17, 18, 19, 20, 21, 22, or 23, contiguous nucleotides differing by no more than one nucleotide from any one of the antisense strand nucleotide sequences of a duplex selected from the group consisting of AD-1718647; AD-1718648; AD-1718649; AD-1718653; AD-1718654 AD-1718655; AD-1718656; AD-1718660; AD-1718662; AD-1718663; AD-1718669; AD-1718670; AD-1718673; AD-1718674; AD-1718676; AD-1718677; AD-1718678; AD-1718679; AD-1718680; AD-1718682; AD-1718683; AD-1718702; AD-1718715; AD-1718717; or AD-1718721.

[0022] In some embodiments, the dsRNA agent comprises a sense strand comprising a nucleotide sequence selected from any one of the sense strand nucleotide sequences of a duplex selected from the group consisting of AD-1718647; AD-1718648; AD-1718649; AD-1718653; AD-1718654 AD-1718655; AD-1718656; AD-1718660; AD-1718662; AD-1718663; AD-1718669; AD-1718670; AD-1718673; AD-1718674; AD-1718676; AD-1718677; AD-1718678; AD-1718679; AD-1718680; AD-1718682; AD-1718683; AD-1718702; AD-1718715; AD-1718717; or AD-1718721, and an antisense strand comprising a nucleotide sequence selected from any one of the antisense strand nucleotide sequences of a duplex elected from the group consisting of AD-1718647; AD-1718648; AD-1718649; AD-1718653; AD-1718654 AD-1718655; AD-1718656; AD-1718660; AD-1718662; AD-1718663; AD-1718669; AD-1718670; AD-1718673; AD-1718674; AD-1718676; AD-1718677; AD-1718678; AD-1718679; AD-1718680; AD-1718682; AD-1718683; AD-1718702; AD-1718715; AD-1718717; or AD-1718721.

[0023] In one embodiment, the dsRNA agent comprises a sense strand comprising a contiguous nucleotide sequence which has at least 85%, e.g., 85%, 90%, 91%, 92%, 93%, 94%, 95%, 96%, 97%, 98%, 99%, or 100%, nucleotide sequence identity over its entire length to any one of the nucleotide sequences of the sense strands of a duplex selected from the group consisting of AD-1718647; AD-1718648; AD-1718649; AD-1718653; AD-1718654 AD-1718655; AD-1718656; AD-1718660; AD-1718662; AD-1718663; AD-1718669; AD-1718670; AD-1718673; AD-1718674; AD-1718676; AD-1718677; AD-1718678; AD-1718679; AD-1718680; AD-1718682; AD-1718683; AD-1718702; AD-1718715; AD-1718717; or AD-1718721, and an antisense strand comprising a contiguous nucleotide sequence which has at least 85%, e.g., 85%, 90%, 91%, 92%, 93%, 94%, 95%, 96%, 97%, 98%, 99%, or 100%, nucleotide sequence identity over its entire length to any one of the nucleotide sequences of the antisense strands of a duplex selected from the group consisting of AD-1718647; AD-1718648; AD-1718649; AD-1718653; AD-1718654 AD-1718655; AD-1718656; AD-1718660; AD-1718662; AD-1718663; AD-1718669; AD-1718670; AD-1718673; AD-1718674; AD-1718676; AD-1718677; AD-1718678; AD-1718679; AD-1718680; AD-1718682; AD-1718683; AD-1718702; AD-1718715; AD-1718717; or AD-1718721.

[0024] The sense strand, the antisense strand, or both the sense strand and the antisense strand may be conjugated to one or more lipophilic moieties. In some embodiments, the lipophilic moiety is conjugated to one or more internal positions in the double stranded region of the dsRNA agent, e.g., the one or more lipophilic moieties may be conjugated to one or more internal positions on the antisense strand. In some embodiments, the one or more lipophilic moieties are conjugated to one or more internal positions on at least one strand via a linker or carrier.

[0025] In some embodiments, lipophilicity of the lipophilic moiety, measured by log Kow, exceeds 0.

[0026] In some embodiments, the hydrophobicity of the dsRNA agent, measured by the unbound fraction in a plasma protein binding assay of the dsRNA agent, exceeds 0.2. In some embodiments, the plasma protein binding assay is an electrophoretic mobility shift assay using human serum albumin protein.

[0027] In some embodiments, the internal positions include all positions except the terminal two positions from each end of the sense strand or the antisense strand. In other embodiments, the internal positions include all positions except the terminal three positions from each end of the sense strand or the antisense strand.

[0028] In some embodiments, the internal positions exclude a cleavage site region of the sense strand, such as the internal positions include all positions except positions 9-12, counting from the 5′-end of the sense strand or the internal positions include all positions except positions 11-13, counting from the 3′-end of the sense strand.

[0029] In some embodiments, the internal positions exclude a cleavage site region of the antisense strand. In other embodiments, the internal positions include all positions except positions 12-14, counting from the 5′-end of the antisense strand. In some embodiments, the internal positions include all positions except positions 11-13 on the sense strand, counting from the 3′-end, and positions 12-14 on the antisense strand, counting from the 5′-end.

[0030] In some embodiments, the one or more lipophilic moieties are conjugated to one or more of the internal positions selected from the group consisting of positions 4-8 and 13-18 on the sense strand, and positions 6-10 and 15-18 on the antisense strand, counting from the 5′end of each strand.

[0031] In some embodiments, the one or more lipophilic moieties are conjugated to one or more of the internal positions selected from the group consisting of positions 5, 6, 7, 15, and 17 on the sense strand, and positions 15 and 17 on the antisense strand, counting from the 5′-end of each strand.

[0032] In some embodiments, the positions in the double stranded region exclude a cleavage site region of the sense strand.

[0033] In some embodiments, the sense strand is 21 nucleotides in length, the antisense strand is 23 nucleotides in length, and the lipophilic moiety is conjugated to position 20, position 15, position 1, position 7, position 6, or position 2 of the sense strand or position 16 of the antisense strand.

[0034] In other embodiments, the sense strand is 21 nucleotides in length, the antisense strand is 23 nucleotides in length, and the lipophilic moiety is conjugated to position 21, position 20, position 15, position 1, position 7, position 6, or position 2 of the sense strand or position 16 of the antisense strand.

[0035] In some embodiments, the lipophilic moiety is an aliphatic, alicyclic, or polyalicyclic compound.

[0036] In some embodiments, the lipophilic moiety is selected from the group consisting of lipid, cholesterol, retinoic acid, cholic acid, adamantane acetic acid, 1-pyrene butyric acid, dihydrotestosterone, 1,3-bis-O(hexadecyl)glycerol, geranyloxyhexyanol, hexadecylglycerol, borneol, menthol, 1,3-propanediol, heptadecyl group, palmitic acid, myristic acid, O3-(oleoyl)lithocholic acid, O3-(oleoyl)cholenic acid, dimethoxytrityl, or phenoxazine.

[0037] In some embodiments, the lipophilic moiety contains a saturated or unsaturated C4-C30 hydrocarbon chain, and an optional functional group selected from the group consisting of hydroxyl, amine, carboxylic acid, sulfonate, phosphate, thiol, azide, and alkyne.

[0038] In some embodiments, the lipophilic moiety contains a saturated or unsaturated C6-C18 hydrocarbon chain.

[0039] In some embodiments, the lipophilic moiety contains a saturated or unsaturated C16 hydrocarbon chain. In some embodiments, the saturated or unsaturated C16 hydrocarbon chain is conjugated to position 6, counting from the 5′-end of the strand.

[0040] In some embodiments, the lipophilic moiety is conjugated via a carrier that replaces one or more nucleotide(s) in the internal position(s) or the double stranded region. In some embodiments, the carrier is a cyclic group selected from the group consisting of pyrrolidinyl, pyrazolinyl, pyrazolidinyl, imidazolinyl, imidazolidinyl, piperidinyl, piperazinyl, [1,3]dioxolanyl, oxazolidinyl, isoxazolidinyl, morpholinyl, thiazolidinyl, isothiazolidinyl, quinoxalinyl, pyridazinonyl, tetrahydrofuranyl, and decalinyl; or is an acyclic moiety based on a serinol backbone or a diethanolamine backbone.

[0041] In some embodiments, the lipophilic moiety is conjugated to the dsRNA agent via a linker containing an ether, thioether, urea, carbonate, amine, amide, maleimide-thioether, disulfide, phosphodiester, sulfonamide linkage, a product of a click reaction, or carbamate.

[0042] In some embodiments, the lipophilic moiety is conjugated to a nucleobase, sugar moiety, or internucleosidic linkage.

[0043] In some embodiments, the dsRNA agent comprises at least one modified nucleotide. In some embodiments, no more than five of the sense strand nucleotides and no more than five of the nucleotides of the antisense strand are unmodified nucleotides. In other embodiments, all of the nucleotides of the sense strand and all of the nucleotides of the antisense strand comprise a modification.

[0044] In some embodiments, at least one of the modified nucleotides is selected from the group a deoxy-nucleotide, a 3′-terminal deoxy-thymine (dT) nucleotide, a 2′-O-methyl modified nucleotide, a 2′-fluoro modified nucleotide, a 2′-deoxy-modified nucleotide, a locked nucleotide, an unlocked nucleotide, a conformationally restricted nucleotide, a constrained ethyl nucleotide, an abasic nucleotide, a 2′-amino-modified nucleotide, a 2′-O-allyl-modified nucleotide, 2′-C-alkyl-modified nucleotide, 2′-hydroxly-modified nucleotide, a 2′-methoxyethyl modified nucleotide, a 2′-O-alkyl-modified nucleotide, a morpholino nucleotide, a phosphoramidate, a non-natural base comprising nucleotide, a tetrahydropyran modified nucleotide, a 1,5-anhydrohexitol modified nucleotide, a cyclohexenyl modified nucleotide, a nucleotide comprising a 5′-phosphorothioate group, a nucleotide comprising a 5′-methylphosphonate group, a nucleotide comprising a 5′ phosphate or 5′ phosphate mimic, a nucleotide comprising vinyl phosphonate, a nucleotide comprising adenosine-glycol nucleic acid (GNA), a nucleotide comprising thymidine-glycol nucleic acid (GNA)S-Isomer, a nucleotide comprising 2-hydroxymethyl-tetrahydrofurane-5-phosphate, a nucleotide comprising 2′-deoxythymidine-3′phosphate, a nucleotide comprising 2′-deoxyguanosine-3′-phosphate, and a terminal nucleotide linked to a cholesteryl derivative and a dodecanoic acid bisdecylamide group; and combinations thereof.

[0045] In other embodiments, the modified nucleotide is selected from the group consisting of a 2′-deoxy-2′-fluoro modified nucleotide, a 2′-deoxy-modified nucleotide, 3′-terminal deoxy-thymine nucleotides (dT), a locked nucleotide, an abasic nucleotide, a 2′-amino-modified nucleotide, a 2′-alkyl-modified nucleotide, a morpholino nucleotide, a phosphoramidate, and a non-natural base comprising nucleotide.

[0046] In some embodiments, at least one of the modified nucleotides is selected from the group consisting of a deoxy-nucleotide, a 2′-O-methyl modified nucleotide, a 2′-fluoro modified nucleotide, a 2′-deoxy-modified nucleotide, a glycol modified nucleotide (GNA), and, a vinyl-phosphonate nucleotide; and combinations thereof.

[0047] In some embodiments, at least one of the modifications on the nucleotides is a thermally destabilizing nucleotide modification. In some embodiments, the thermally destabilizing nucleotide modification is selected from the group consisting of an abasic modification; a mismatch with the opposing nucleotide in the duplex; and destabilizing sugar modification, a 2′-deoxy modification, an acyclic nucleotide, an unlocked nucleic acids (UNA), and a glycerol nucleic acid (GNA)

[0048] In some embodiments, the modified nucleotide comprises a short sequence of 3′-terminal deoxy-thymine nucleotides (dT).

[0049] In some embodiments, the modifications on the nucleotides are 2′-O-methyl, GNA and 2′fluoro modifications.

[0050] In some embodiments, the dsRNA comprises at least one, e.g., 2, 3, 4, 5, 6, 7, 8, 9, 10 or more, 2′-fluoro nucleotide modifications.

[0051] In some embodiments, the antisense strand comprises at least one, e.g., 2, 3, 4, 5 or more 2′-fluoro nucleotide modification.

[0052] In some embodiments, the antisense strand comprises a 2′-fluoro nucleotide at positions 2, 14 and 16, counting from the 5′-end of the antisense strand.

[0053] In some embodiments, the antisense strand comprises a 2′-fluoro nucleotide at positions 2, 6, 14 and 16, counting from the 5′-end of the antisense strand.

[0054] In some embodiments, the antisense strand comprises a 2′-fluoro nucleotide at positions 2, 6, 9, 14 and 16, counting from the 5′-end of the antisense strand.

[0055] In some embodiments, wherein the antisense strand comprises a 2′-fluoro nucleotide at positions 2, 6, 8, 9, 14 and 16, counting from the 5′-end of the antisense strand.

[0056] In some embodiments, the antisense strand comprises at least one, e.g., 2, 3, 4, 5 or more 2′-fluoro nucleotides.

[0057] In some embodiments, the sense strand comprises a 2′-fluoro nucleotide at positions 7, 9 and 11, counting from the 5′-end of the sense strand or at positions 11, 13 and 15, counting from the 3′-end of the sense strand.

[0058] In some embodiments, the sense strand comprises a 2′-fluoro nucleotide at positions 7, 9, 10 and 11, counting from the 5′-end of the sense strand or at positions 11, 12, 13 and 15, counting from the 3′-end of the sense strand.

[0059] In some embodiments, the sense strand comprises a 2′-fluoro nucleotide at positions 9, 10, and 11, counting from the 5′-end of the sense strand or at positions 11, 12, and 13 counting from the 3′-end of the sense strand.

[0060] In some embodiments, the antisense strand comprises at least one, e.g., 2, 3, 4, 5, 6, 7 or more DNA nucleotides.

[0061] In some embodiments, the antisense strand comprises a DNA nucleotide at positions 2, 5, 7, and 12, counting from the 5′-end of the antisense strand.

[0062] In some embodiments, the antisense strand comprises a DNA nucleotide at positions 2, 5, 7, 12, and 14 counting from the 5′-end of the antisense strand.

[0063] In some embodiments, the antisense strand a DNA nucleotide at positions 2, 5, 7, and 12, and a 2′-fluoro nucleotide at position 14 counting from the 5′-end of the antisense strand.

[0064] In some embodiments, the antisense strand a DNA nucleotide at positions 2, 5, 7, 12, 14 and 16 counting from the 5′-end of the antisense strand.

[0065] In some embodiments, the dsRNA comprises at least one thermally destabilizing modification.

[0066] In some embodiments, the antisense strand comprises at least one thermally destabilizing modification.

[0067] In some embodiments, the antisense strand comprises at least one thermally destabilizing modification in the seed region (i.e., positions 2-9 from the 5′-end) of the antisense strand.

[0068] In some embodiments, the antisense strand comprises a thermally destabilizing modification at least at one of positions 6, 7 or 8, counting from the 5′-end of the strand.

[0069] In some embodiments, the antisense strand comprises a thermally destabilizing modification at position 7, counting from the 5′-end of the strand.

[0070] In some embodiments, the thermally destabilizing modification is an abasic nucleotide, 2′-deoxy nucleotides, acyclic nucleotide (e.g., unlocked nucleic acid (UNA), glycol nucleic acid (GNA) or (S)-glycol nucleic acid (S-GNA)), a 2′-5′ linked nucleotide (3′-RNA), threose nucleotide (TNA), 2′ gem Me/F nucleotide or mismatch with an opposing nucleotide in the other strand.

[chemical structure]

[0071] In some embodiments, any nucleotide not otherwise defined is 2′-OMe.

[0072] In some embodiments, the dsRNA agent further comprises at least one phosphorothioate internucleotide linkage. In some embodiments, the dsRNA agent comprises 6-8 phosphorothioate internucleotide linkages. In one embodiment, the phosphorothioate or methylphosphonate internucleotide linkage is at the 3′-terminus of one strand. Optionally, the strand is the antisense strand. In another embodiment, the strand is the sense strand. In a related embodiment, the phosphorothioate or methylphosphonate internucleotide linkage is at the 5′-terminus of one strand. Optionally, the strand is the antisense strand. In another embodiment, the strand is the sense strand. In another embodiment, the phosphorothioate or methylphosphonate internucleotide linkage is at the both the 5′- and 3′-terminus of one strand. Optionally, the strand is the antisense strand. In another embodiment, the strand is the sense strand.

[0073] In some embodiments, each strand is no more than 30 nucleotides in length.

[0074] In some embodiments, at least one strand comprises a 3′ overhang of at least 1 nucleotide or a 3′ overhang of at least 2 nucleotides.

[0075] The double stranded region may be 15-30 nucleotide pairs in length; 17-23 nucleotide pairs in length; 17-25 nucleotide pairs in length; 23-27 nucleotide pairs in length; 19-21 nucleotide pairs in length; or 21-23 nucleotide pairs in length.

[0076] Each strand may be 19-30 nucleotides; 19-23 nucleotides; or 21-23 nucleotides.

[0077] In some embodiments, the dsRNA agent further comprises a targeting ligand that targets a liver tissue. In some embodiments, the targeting ligand is a GalNAc conjugate. In other embodiments, the dsRNA agent does not comprise a targeting ligand that targets a liver tissue, such as a GalNAc conjugate.

[0078] In certain embodiments, the double-stranded RNAi agent further includes a targeting ligand that targets a receptor which mediates delivery to a CNS tissue, e.g., a hydrophilic ligand.

[0079] In certain embodiments, the targeting ligand is a C16 ligand. In one embodiment, the ligand is

[chemical structure]

where B is a nucleotide base or a nucleotide base analog, optionally where B is adenine, guanine, cytosine, thymine or uracil.

[0080] In some embodiments, the dsRNA agent further includes a targeting ligand that targets a receptor which mediates delivery to a CNS tissue, e.g., a hydrophilic ligand, such as a C16 ligand, e.g.,

[chemical structure]

where B is a nucleotide base or a nucleotide base analog, optionally where B is adenine, guanine, cytosine, thymine or uracil and does not comprise a targeting ligand that targets a liver tissue, such as a GalNAc conjugate.

[0081] In some embodiments, the lipophilic moeity or targeting ligand is conjugated via a bio-cleavable linker selected from the group consisting of DNA, RNA, disulfide, amide, functionalized monosaccharides or oligosaccharides of galactosamine, glucosamine, glucose, galactose, mannose, and combinations thereof.

[0082] In some embodiments, the 3′ end of the sense strand is protected via an end cap which is a cyclic group having an amine, said cyclic group being selected from the group consisting of pyrrolidinyl, pyrazolinyl, pyrazolidinyl, imidazolinyl, imidazolidinyl, piperidinyl, piperazinyl, [1,3]dioxolanyl, oxazolidinyl, isoxazolidinyl, morpholinyl, thiazolidinyl, isothiazolidinyl, quinoxalinyl, pyridazinonyl, tetrahydrofuranyl, and decalinyl.

[0083] In some embodiments, the dsRNA agent further comprises a terminal, chiral modification occurring at the first internucleotide linkage at the 3′ end of the antisense strand, having the linkage phosphorus atom in Sp configuration, a terminal, chiral modification occurring at the first internucleotide linkage at the 5′ end of the antisense strand, having the linkage phosphorus atom in Rp configuration, and a terminal, chiral modification occurring at the first internucleotide linkage at the 5′ end of the sense strand, having the linkage phosphorus atom in either Rp configuration or Sp configuration.

[0084] In some embodiments, the dsRNA agent further comprises a terminal, chiral modification occurring at the first and second internucleotide linkages at the 3′ end of the antisense strand, having the linkage phosphorus atom in Sp configuration, a terminal, chiral modification occurring at the first internucleotide linkage at the 5′ end of the antisense strand, having the linkage phosphorus atom in Rp configuration, and a terminal, chiral modification occurring at the first internucleotide linkage at the 5′ end of the sense strand, having the linkage phosphorus atom in either Rp or Sp configuration.

[0085] In some embodiments, the dsRNA agent further comprises a terminal, chiral modification occurring at the first, second and third internucleotide linkages at the 3′ end of the antisense strand, having the linkage phosphorus atom in Sp configuration, a terminal, chiral modification occurring at the first internucleotide linkage at the 5′ end of the antisense strand, having the linkage phosphorus atom in Rp configuration, and a terminal, chiral modification occurring at the first internucleotide linkage at the 5′ end of the sense strand, having the linkage phosphorus atom in either Rp or Sp configuration.

[0086] In some embodiments, the dsRNA agent further comprises a terminal, chiral modification occurring at the first, and second internucleotide linkages at the 3′ end of the antisense strand, having the linkage phosphorus atom in Sp configuration, a terminal, chiral modification occurring at the third internucleotide linkages at the 3′ end of the antisense strand, having the linkage phosphorus atom in Rp configuration, a terminal, chiral modification occurring at the first internucleotide linkage at the 5′ end of the antisense strand, having the linkage phosphorus atom in Rp configuration, and a terminal, chiral modification occurring at the first internucleotide linkage at the 5′ end of the sense strand, having the linkage phosphorus atom in either Rp or Sp configuration.

[0087] In some embodiments, the dsRNA agent further comprises a terminal, chiral modification occurring at the first, and second internucleotide linkages at the 3′ end of the antisense strand, having the linkage phosphorus atom in Sp configuration, a terminal, chiral modification occurring at the first, and second internucleotide linkages at the 5′ end of the antisense strand, having the linkage phosphorus atom in Rp configuration, and a terminal, chiral modification occurring at the first internucleotide linkage at the 5′ end of the sense strand, having the linkage phosphorus atom in either Rp or Sp configuration.

[0088] In some embodiments, the dsRNA agent further comprises a phosphate or phosphate mimic at the 5′-end of the antisense strand. In some embodiments, the phosphate mimic is a 5′-vinyl phosphonate (VP).

[0089] In some embodiments, the base pair at the 1 position of the 5′-end of the antisense strand of the duplex is an AU base pair.

[0090] In some embodiments, the sense strand has a total of 21 nucleotides and the antisense strand has a total of 23 nucleotides.

[0091] The present invention further provides cells containing any of the dsRNA agents of the invention and pharmaceutical compositions for inhibiting expression of a gene encoding HTT, comprising any of the dsRNA agents of the invention.

[0092] In one embodiment, the double stranded RNAi agent is in an unbuffered solution. Optionally, the unbuffered solution is saline or water. In another embodiment, the double stranded RNAi agent is in a buffer solution. Optionally, the buffer solution includes acetate, citrate, prolamine, carbonate, or phosphate or any combination thereof. In another embodiment, the buffer solution is phosphate buffered saline (PBS). Another aspect of the disclosure provides a pharmaceutical composition that includes a double stranded RNAi agent of the instant disclosure and a lipid formulation. In one embodiment, the lipid formulation includes a lipid nanoparticle (LNP).

[0093] An additional aspect of the disclosure provides a method of inhibiting expression of an HTT gene in a cell, the method including (a) contacting the cell with a double stranded RNAi agent of the instant disclosure, or a pharmaceutical composition of of the instant disclosure; and (b) maintaining the cell produced in step (a) for a time sufficient to obtain degradation of the mRNA transcript of an HTT gene, thereby inhibiting expression of the HTT gene in the cell.

[0094] In one embodiment, the cell is within a subject. Optionally, the subject is a human.

[0095] In certain embodiments, the subject is a rhesus monkey, a cynomolgous monkey, a mouse, or a rat. In certain embodiments HTT expression is inhibited by at least about 50% by the RNAi agent.

[0096] In certain embodiments, the human subject has been diagnosed with an HTT-associated disease, e.g., Huntington's disease.

[0097] Another aspect of the disclosure provides a method of treating a subject diagnosed with an HTT-associated disease, e.g., Huntington's disease, the method including administering to the subject a therapeutically effective amount of a double stranded RNAi agent of the disclosure, or a pharmaceutical composition of the disclosure, thereby treating the subject.

[0098] In one embodiment, treating comprises amelioration of at least on sign or symptom of the disease. In another embodiment, treating comprises prevention of progression of the disease.

[0099] In some embodiments, the dsRNA agent is administered to the subject at a dose of about 0.01 mg/kg to about 50 mg/kg.

[0100] In some embodiments, the dsRNA agent is administered to the subject intrathecally. In one embodiment, the method reduces the expression of an HTT gene in a brain (e.g., striatum) or spine tissue. Optionally, the brain or spine tissue is striatum, cortex, cerebellum, cervical spine, lumbar spine, or thoracic spine.

[0101] In some embodiments, the method further comprises measuring a level of HTT in a sample obtained from the subject.

[0102] Another aspect of the instant disclosure provides a method of inhibiting the expression of huntingtin (HTT) in a subject, the method involving: administering to the subject a therapeutically effective amount of a double stranded RNAi agent of the disclosure or a pharmaceutical composition of the disclosure, thereby inhibiting the expression of HTT in the subject.

[0103] In some embodiment, the method further comprises administering to the subject an additional agent suitable for treatment or prevention of an HTT-associated disorder.

[0104] The present invention also provides an RNA-induced silencing complex (RISC) comprising an antisense strand of any of the dsRNA agents of the present invention.

[0105] In one embodiment, the dsRNA agent is a pharmaceutically acceptable salt thereof. “Pharmaceutically acceptable salts” of each of dsRNA agents herein include, but are not limited to, a sodium salt, a calcium salt, a lithium salt, a potassium salt, an ammonium salt, a magnesium salt, an mixtures thereof. One skilled in the art will appreciate that the dsRNA agent, when provided as a polycationic salt having one cation per free acid group of the optionally modified phosophodiester backbone and/or any other acidic modifications (e.g., 5′-terminal phosphonate groups). For example, an oligonucleotide of “n” nucleotides in length contains n−1 optionally modified phosophodiesters, so that an oligonucleotide of 21 nt in length may be provided as a salt having up to 20 cations (e.g, 20 sodium cations). Similarly, an RNAi agents having a sense strand of 21 nt in length and an antisense strand of 23 nt in length may be provided as a salt having up to 42 cations (e.g, 42 sodium cations). In the preceding example, where the dsRNA agent also includes a 5′-terminal phosphate or a 5′-terminal vinylphosphonate group, the dsRNA agent may be provided as a salt having up to 44 cations (e.g, 44 sodium cations).

### DETAILED DESCRIPTION OF THE INVENTION

[0106] The present disclosure provides RNAi compositions, which effect the RNA-induced silencing complex (RISC)-mediated cleavage of RNA transcripts of a huntingtin (HTT) gene. The HTT gene may be within a cell, e.g., a cell within a subject, such as a human. The use of these iRNAs enables the targeted degradation of mRNAs of the corresponding gene (HTT gene) in mammals.

[0107] The iRNAs of the invention have been designed to target intron 1 retained in the truncated mutant HTT gene, thereby inhibiting expression of the truncated mutant HTT transcript encoding an expanded polyglutamine repeat while sparing full-length wild-type HTT. Without intending to be limited by theory, it is believed that a combination or sub-combination of the foregoing properties and the specific target sites, or the specific modifications in these iRNAs confer to the iRNAs of the invention improved efficacy, stability, potency, durability, and safety.

[0108] Accordingly, the present disclosure also provides methods of using the RNAi compositions of the disclosure, including, compositions comprising one or more, e.g., 2, 3, or 4, dsRNA agents of the invention, for inhibiting the expression of an HTT gene or for treating a subject having a disorder that would benefit from inhibiting or reducing the expression of an HTT gene, e.g., an HTT-associated disease, for example, Huntington's disease (HD).

[0109] The RNAi agents of the disclosure include an RNA strand (the antisense strand) having a region which is about 30 nucleotides or less in length, e.g., 15-30, 15-29, 15-28, 15-27, 15-26, 15-25, 15-24, 15-23, 15-22, 15-21, 15-20, 15-19, 15-18, 15-17, 18-30, 18-29, 18-28, 18-27, 18-26, 18-25, 18-24, 18-23, 18-22, 18-21, 18-20, 19-30, 19-29, 19-28, 19-27, 19-26, 19-25, 19-24, 19-23, 19-22, 19-21, 19-20, 20-30, 20-29, 20-28, 20-27, 20-26, 20-25, 20-24, 20-23, 20-22, 20-21, 21-30, 21-29, 21-28, 21-27, 21-26, 21-25, 21-24, 21-23, or 21-22 nucleotides in length, which region is substantially complementary to at least part of an mRNA transcript of an HTT gene. In certain embodiments, the RNAi agents of the disclosure include an RNA strand (the antisense strand) having a region which is about 21-23 nucleotides in length, which region is substantially complementary to at least part of an mRNA transcript of an HTT gene.

[0110] In certain embodiments, the RNAi agents of the disclosure include an RNA strand (the antisense strand) which can include longer lengths, for example up to 66 nucleotides, e.g., 36-66, 26-36, 25-36, 31-60, 22-43, 27-53 nucleotides in length with a region of at least 19 contiguous nucleotides that is substantially complementary to at least a part of an mRNA transcript of an HTT gene. These RNAi agents with the longer length antisense strands preferably include a second RNA strand (the sense strand) of 20-60 nucleotides in length wherein the sense and antisense strands form a duplex of 18-30 contiguous nucleotides.

[0111] The use of these RNAi agents enables the targeted degradation of mRNAs of an HTT gene in mammals. Thus, methods and compositions including these RNAi agents are useful for treating a subject who would benefit by a reduction in the levels or activity of an HTT protein, such as a subject having an HTT-associated disease, such as Huntington's disease (HD).

[0112] The following detailed description discloses how to make and use compositions containing RNAi agents to inhibit the expression of an HTT gene, as well as compositions and methods for treating subjects having diseases and disorders that would benefit from inhibition or reduction of the expression of the genes.

### I. Definitions

[0113] In order that the present disclosure may be more readily understood, certain terms are first defined. In addition, it should be noted that whenever a value or range of values of a parameter are recited, it is intended that values and ranges intermediate to the recited values are also intended to be part of this disclosure.

[0114] The articles “a” and “an” are used herein to refer to one or to more than one (i.e., to at least one) of the grammatical object of the article. By way of example, “an element” means one element or more than one element, e.g., a plurality of elements.

[0115] The term “including” is used herein to mean, and is used interchangeably with, the phrase “including but not limited to”. The term “or” is used herein to mean, and is used interchangeably with, the term “and/or,” unless context clearly indicates otherwise.

[0116] The term “about” is used herein to mean within the typical ranges of tolerances in the art. For example, “about” can be understood as about 2 standard deviations from the mean. In certain embodiments, about means±10%. In certain embodiments, about means±5%. When about is present before a series of numbers or a range, it is understood that “about” can modify each of the numbers in the series or range.

[0117] The term “at least”, “no less than”, or “or more” prior to a number or series of numbers is understood to include the number adjacent to the term “at least”, and all subsequent numbers or integers that could logically be included, as clear from context. For example, the number of nucleotides in a nucleic acid molecule must be an integer. For example, “at least 18 nucleotides of a 21 nucleotide nucleic acid molecule” means that 18, 19, 20, or 21 nucleotides have the indicated property. When at least is present before a series of numbers or a range, it is understood that “at least” can modify each of the numbers in the series or range.

[0118] As used herein, “no more than” or “less than” is understood as the value adjacent to the phrase and logical lower values or integers, as logical from context, to zero. For example, a duplex with an overhang of “no more than 2 nucleotides” has a 2, 1, or 0 nucleotide overhang. When “no more than” is present before a series of numbers or a range, it is understood that “no more than” can modify each of the numbers in the series or range.

[0119] As used herein, methods of detection can include determination that the amount of analyte present is below the level of detection of the method.

[0120] In the event of a conflict between an indicated target site and the nucleotide sequence for a sense or antisense strand, the indicated sequence takes precedence.

[0121] In the event of a conflict between a chemical structure and a chemical name, the chemical structure takes precedence.

[0122] The term “HTT” or “huntingtin”, also known as “Huntingtin,” “Huntington Disease Protein,” “IT15,” “HD,” HD Protein,” or “LOMARS,” refers to the well-known gene that encodes the protein, HTT, that is widely expressed, required for normal development and the disease gene linked to Huntington's disease, a neurodegenerative disorder characterized by loss of striatal neurons caused by an expanded, unstable trinucleotide (CAG) repeat in the huntingtin gene, which translates as a polyglutamine repeat in the protein product.

[0123] Exemplary nucleotide and amino acid sequences of HTT can be found, for example, at GenBank Accession No. NM_002111.8 (Homo sapiens HTT, SEQ ID NO: 1, reverse complement, SEQ ID NO: 6); GenBank Accession No. NM_010414.3 (Mus musculus HTT, SEQ ID NO: 2; reverse complement, SEQ ID NO: 7); GenBank Accession No.: NM_024357.3 (Rattus norvegicus HTT, SEQ ID NO: 3, reverse complement, SEQ ID NO: 8); GenBank Accession No.: XM_015449989.1 (Macaca fascicularis HTT, SEQ ID NO: 4, reverse complement, SEQ ID NO: 9); GenBank Accession No.: XM_028848247.1 (Macaca mulatta HTT, SEQ ID NO: 5, reverse complement, SEQ ID NO: 10);

[0124] GenBank Accession No.: NG_009378.1 (Homo sapiens huntingtin (HTT), RefSeqGene (LRG_763) on chromosome 4, SEQ ID NO:11, reverse complement, SEQ ID NO:12); and Gen Bank Accession No.: NC_000004.12 (Homo sapiens chromosome 4, GRCh38.p13 Primary Assembly).

[0125] Additional examples of HTT sequences can be found in publically available databases, for example, GenBank, OMIM, and UniProt.

[0126] Further information on HTT can be found, for example, at www.ncbi.nlm.nih.gov/gene/3064.

[0127] The entire contents of each of the foregoing GenBank Accession numbers and the Gene database numbers are incorporated herein by reference as of the date of filing this application.

[0128] The term HTT, as used herein, also refers to variations of the HTT gene including variants provided in the SNP database. Numerous sequence variations within the HTT gene have been identified and may be found at, for example, NCBI dbSNP and UniProt (see, e.g., www.ncbi.nlm.nih.gov/snp/?LinkName=gene_snp&from_uid=3064, the entire contents of which is incorporated herein by reference as of the date of filing this application.

[0129] As used herein, “target sequence” refers to a contiguous portion of the nucleotide sequence of an mRNA molecule formed during the transcription of an HTT gene, including mRNA that is a product of RNA processing of a primary transcription product. In one embodiment, the target portion of the sequence will be at least long enough to serve as a substrate for RNAi-directed cleavage at or near that portion of the nucleotide sequence of an mRNA molecule formed during the transcription of an HTT gene.

[0130] The target sequence is about 15-30 nucleotides in length. For example, the target sequence can be from about 15-30 nucleotides, 15-29, 15-28, 15-27, 15-26, 15-25, 15-24, 15-23, 15-22, 15-21, 15-20, 15-19, 15-18, 15-17, 18-30, 18-29, 18-28, 18-27, 18-26, 18-25, 18-24, 18-23, 18-22, 18-21, 18-20, 19-30, 19-29, 19-28, 19-27, 19-26, 19-25, 19-24, 19-23, 19-22, 19-21, 19-20, 20-30, 20-29, 20-28, 20-27, 20-26, 20-25, 20-24, 20-23, 20-22, 20-21, 21-30, 21-29, 21-28, 21-27, 21-26, 21-25, 21-24, 21-23, or 21-22 nucleotides in length. In certain embodiments, the target sequence is 19-23 nucleotides in length, optionally 21-23 nucleotides in length. Ranges and lengths intermediate to the above recited ranges and lengths are also contemplated to be part of the disclosure.

[0131] As used herein, the term “strand comprising a sequence” refers to an oligonucleotide comprising a chain of nucleotides that is described by the sequence referred to using the standard nucleotide nomenclature.

[0132] “G,” “C,” “A,” “T”, and “U” each generally stand for a nucleotide that contains guanine, cytosine, adenine, thymidine, and uracil as a base, respectively in the context of a modified or unmodified nucleotide. However, it will be understood that the term “ribonucleotide” or “nucleotide” can also refer to a modified nucleotide, as further detailed below, or a surrogate replacement moiety (see, e.g., Table 1). The skilled person is well aware that guanine, cytosine, adenine, thymidine, and uracil can be replaced by other moieties without substantially altering the base pairing properties of an oligonucleotide comprising a nucleotide bearing such replacement moiety. For example, without limitation, a nucleotide comprising inosine as its base can base pair with nucleotides containing adenine, cytosine, or uracil. Hence, nucleotides containing uracil, guanine, or adenine can be replaced in the nucleotide sequences of dsRNA featured in the disclosure by a nucleotide containing, for example, inosine. In another example, adenine and cytosine anywhere in the oligonucleotide can be replaced with guanine and uracil, respectively to form G-U Wobble base pairing with the target mRNA. Sequences containing such replacement moieties are suitable for the compositions and methods featured in the disclosure.

[0133] The terms “iRNA”, “RNAi agent,” “iRNA agent,” “RNA interference agent” as used interchangeably herein, refer to an agent that contains RNA as that term is defined herein, and which mediates the targeted cleavage of an RNA transcript via an RNA-induced silencing complex (RISC) pathway. RNA interference (RNAi) is a process that directs the sequence-specific degradation of mRNA. RNAi modulates, e.g., inhibits, the expression of HTT in a cell, e.g., a cell within a subject, such as a mammalian subject.

[0134] In one embodiment, an RNAi agent of the disclosure includes a single stranded RNAi that interacts with a target RNA sequence, e.g., an HTT target mRNA sequence, to direct the cleavage of the target RNA. Without wishing to be bound by theory it is believed that long double stranded RNA introduced into cells is broken down into double-stranded short interfering RNAs (siRNAs) comprising a sense strand and an antisense strand by a Type III endonuclease known as Dicer (Sharp et al. (2001) Genes Dev. 15:485). Dicer, a ribonuclease-III-like enzyme, processes these dsRNA into 19-23 base pair short interfering RNAs with characteristic two base 3′ overhangs (Bernstein, et al., (2001) Nature 409:363). These siRNAs are then incorporated into an RNA-induced silencing complex (RISC) where one or more helicases unwind the siRNA duplex, enabling the complementary antisense strand to guide target recognition (Nykanen, et al., (2001) Cell 107:309). Upon binding to the appropriate target mRNA, one or more endonucleases within the RISC cleave the target to induce silencing (Elbashir, et al., (2001) Genes Dev. 15:188). Thus, in one aspect the disclosure relates to a single stranded RNA (ssRNA) (the antisense strand of a siRNA duplex) generated within a cell and which promotes the formation of a RISC complex to effect silencing of the target gene, i.e., an HTT gene. Accordingly, the term “siRNA” is also used herein to refer to an RNAi as described above.

[0135] In another embodiment, the RNAi agent may be a single-stranded RNA that is introduced into a cell or organism to inhibit a target mRNA. Single-stranded RNAi agents bind to the RISC endonuclease, Argonaute 2, which then cleaves the target mRNA. The single-stranded siRNAs are generally 15-30 nucleotides and are chemically modified. The design and testing of single-stranded RNAs are described in U.S. Pat. No. 8,101,348 and in Lima et al., (2012) Cell 150:883-894, the entire contents of each of which are hereby incorporated herein by reference. Any of the antisense nucleotide sequences described herein may be used as a single-stranded siRNA as described herein or as chemically modified by the methods described in Lima et al., (2012) Cell 150:883-894.

[0136] In another embodiment, a “RNAi agent” for use in the compositions and methods of the disclosure is a double stranded RNA and is referred to herein as a “double stranded RNAi agent,” “double stranded RNA (dsRNA) molecule,” “dsRNA agent,” or “dsRNA”. The term “dsRNA” refers to a complex of ribonucleic acid molecules, having a duplex structure comprising two anti-parallel and substantially complementary nucleic acid strands, referred to as having “sense” and “antisense” orientations with respect to a target RNA, i.e., an HTT gene. In some embodiments of the disclosure, a double stranded RNA (dsRNA) triggers the degradation of a target RNA, e.g., an mRNA, through a post-transcriptional gene-silencing mechanism referred to herein as RNA interference or RNAi.

[0137] In general, a dsRNA molecule can include ribonucleotides, but as described in detail herein, each or both strands can also include one or more non-ribonucleotides, e.g., a deoxyribonucleotide, a modified nucleotide. In addition, as used in this specification, an “RNAi agent” may include ribonucleotides with chemical modifications; an RNAi agent may include substantial modifications at multiple nucleotides. As used herein, the term “modified nucleotide” refers to a nucleotide having, independently, a modified sugar moiety, a modified internucleotide linkage, or a modified nucleobase. Thus, the term modified nucleotide encompasses substitutions, additions or removal of, e.g., a functional group or atom, to internucleoside linkages, sugar moieties, or nucleobases. The modifications suitable for use in the agents of the disclosure include all types of modifications disclosed herein or known in the art. Any such modifications, as used in a siRNA type molecule, are encompassed by “RNAi agent” for the purposes of this specification and claims.

[0138] In certain embodiments of the instant disclosure, inclusion of a deoxy-nucleotide if present within an RNAi agent can be considered to constitute a modified nucleotide.

[0139] The duplex region may be of any length that permits specific degradation of a desired target RNA through a RISC pathway, and may range from about 15-36 base pairs in length, for example, about 15, 16, 17, 18, 19, 20, 21, 22, 23, 24, 25, 26, 27, 28, 29, 30, 31, 32, 33, 34, 35, or 36 base pairs in length, such as about 15-30, 15-29, 15-28, 15-27, 15-26, 15-25, 15-24, 15-23, 15-22, 15-21, 15-20, 15-19, 15-18, 15-17, 18-30, 18-29, 18-28, 18-27, 18-26, 18-25, 18-24, 18-23, 18-22, 18-21, 18-20, 19-30, 19-29, 19-28, 19-27, 19-26, 19-25, 19-24, 19-23, 19-22, 19-21, 19-20, 20-30, 20-29, 20-28, 20-27, 20-26, 20-25, 20-24, 20-23, 20-22, 20-21, 21-30, 21-29, 21-28, 21-27, 21-26, 21-25, 21-24, 21-23, or 21-22 base pairs in length. In certain embodiments, the duplex region is 19-21 base pairs in length, e.g., 21 base pairs in length. Ranges and lengths intermediate to the above recited ranges and lengths are also contemplated to be part of the disclosure.

[0140] The two strands forming the duplex structure may be different portions of one larger RNA molecule, or they may be separate RNA molecules. Where the two strands are part of one larger molecule, and therefore are connected by an uninterrupted chain of nucleotides between the 3′-end of one strand and the 5′-end of the respective other strand forming the duplex structure, the connecting RNA chain is referred to as a “hairpin loop.” A hairpin loop can comprise at least one unpaired nucleotide. In some embodiments, the hairpin loop can comprise at at least 4, at least 5, at least 6, at least 7, at least 8, at least 9, at least 10, at least 20, at least 23 or more unpaired nucleotides or nucleotides not directed to the target site of the dsRNA. In some embodiments, the hairpin loop can be 10 or fewer nucleotides. In some embodiments, the hairpin loop can be 8 or fewer unpaired nucleotides. In some embodiments, the hairpin loop can be 4-10 unpaired nucleotides. In some embodiments, the hairpin loop can be 4-8 nucleotides.

[0141] Where the two substantially complementary strands of a dsRNA are comprised by separate RNA molecules, those molecules need not, but can be covalently connected. In certain embodiments where the two strands are connected covalently by means other than an uninterrupted chain of nucleotides between the 3′-end of one strand and the 5′-end of the respective other strand forming the duplex structure, the connecting structure is referred to as a “linker” (though it is noted that certain other structures defined elsewhere herein can also be referred to as a “linker”). The RNA strands may have the same or a different number of nucleotides. The maximum number of base pairs is the number of nucleotides in the shortest strand of the dsRNA minus any overhangs that are present in the duplex. In addition to the duplex structure, an RNAi may comprise one or more nucleotide overhangs. In one embodiment of the RNAi agent, at least one strand comprises a 3′ overhang of at least 1 nucleotide. In another embodiment, at least one strand comprises a 3′ overhang of at least 2 nucleotides, e.g., 2, 3, 4, 5, 6, 7, 9, 10, 11, 12, 13, 14, or 15 nucleotides. In other embodiments, at least one strand of the RNAi agent comprises a 5′ overhang of at least 1 nucleotide. In certain embodiments, at least one strand comprises a 5′ overhang of at least 2 nucleotides, e.g., 2, 3, 4, 5, 6, 7, 9, 10, 11, 12, 13, 14, or 15 nucleotides. In still other embodiments, both the 3′ and the 5′ end of one strand of the RNAi agent comprise an overhang of at least 1 nucleotide.

[0142] In one embodiment, an RNAi agent of the disclosure is a dsRNA, each strand of which independently comprises 19-23 nucleotides, that interacts with a target RNA sequence, e.g., an HTT target mRNA sequence, to direct the cleavage of the target RNA.

[0143] As used herein, the term “nucleotide overhang” refers to at least one unpaired nucleotide that protrudes from the duplex structure of an RNAi agent, e.g., a dsRNA. For example, when a 3-end of one strand of a dsRNA extends beyond the 5-end of the other strand, or vice versa, there is a nucleotide overhang. A dsRNA can comprise an overhang of at least one nucleotide; alternatively, the overhang can comprise at least two nucleotides, at least three nucleotides, at least four nucleotides, at least five nucleotides or more. A nucleotide overhang can comprise or consist of a nucleotide/nucleoside analog, including a deoxynucleotide/nucleoside. The overhang(s) can be on the sense strand, the antisense strand or any combination thereof. Furthermore, the nucleotide(s) of an overhang can be present on the 5-end, 3-end or both ends of either an antisense or sense strand of a dsRNA.

[0144] In one embodiment, the antisense strand of a dsRNA has a 1-10 nucleotide, e.g., a 1, 2, 3, 4, 5, 6, 7, 8, 9, or 10 nucleotide, overhang at the 3′-end or the 5′-end. In one embodiment, the sense strand of a dsRNA has a 1-10 nucleotide, e.g., a 1, 2, 3, 4, 5, 6, 7, 8, 9, or 10 nucleotide, overhang at the 3′-end or the 5′-end. In another embodiment, one or more of the nucleotides in the overhang is replaced with a nucleoside thiophosphate.

[0145] In certain embodiments, the antisense strand of a dsRNA has a 1-10 nucleotide, e.g., 0-3, 1-3, 2-4, 2-5, 4-10, 5-10, e.g., a 1, 2, 3, 4, 5, 6, 7, 8, 9, or 10 nucleotide, overhang at the 3′-end or the 5′-end. In one embodiment, the sense strand of a dsRNA has a 1-10 nucleotide, e.g., a 1, 2, 3, 4, 5, 6, 7, 8, 9, or 10 nucleotide, overhang at the 3′-end or the 5′-end. In another embodiment, one or more of the nucleotides in the overhang is replaced with a nucleoside thiophosphate.

[0146] In certain embodiments, the overhang on the sense strand or the antisense strand, can include extended lengths longer than 10 nucleotides, e.g., 1-30 nucleotides, 2-30 nucleotides, 10-30 nucleotides, or 10-15 nucleotides in length. In certain embodiments, an extended overhang is on the sense strand of the duplex. In certain embodiments, an extended overhang is present on the 3′end of the sense strand of the duplex. In certain embodiments, an extended overhang is present on the 5′end of the sense strand of the duplex. In certain embodiments, an extended overhang is on the antisense strand of the duplex. In certain embodiments, an extended overhang is present on the 3′end of the antisense strand of the duplex. In certain embodiments, an extended overhang is present on the 5′end of the antisense strand of the duplex. In certain embodiments, one or more of the nucleotides in the overhang is replaced with a nucleoside thiophosphate. In certain embodiments, the overhang includes a self-complementary portion such that the overhang is capable of forming a hairpin structure that is stable under physiological conditions.

[0147] In certain embodiments, at least one end of at least one strand is extended beyond a duplex targeting region, including structures where one of the strands includes a thermodynamically—stabilizing tetraloop structure (see, e.g., U.S. Pat. Nos. 8,513,207 and 8,927,705, as well as WO2010033225, the entire contents of each of which are incorporated by reference herein). Such structures may include single-stranded extensions (on one or both sides of the molecule) as well as double-stranded extensions.

[0148] In certain embodiments, the 3′ end of the sense strand and the 5′ end of the antisense strand are joined by a polynucleotide sequence comprising ribonucleotides, deoxyribonucleotides or both, optionally wherein the polynucleotide sequence comprises a tetraloop sequence. In certain embodiments, the sense strand is 25-35 nucleotides in length.

[0149] A tetraloop may contain ribonucleotides, deoxyribonucleotides, modified nucleotides, and combinations thereof. Typically, a tetraloop has 4 to 5 nucleotides. In some embodiments, the loop comprises a sequence set forth as GAAA. In some embodiments, at least one of the nucleotide of the loop (GAAA) comprises a nucleotide modification. In some embodiments, the modified nucleotide comprises a 2′-modification. In some embodiments, the 2′-modification is a modification selected from the group consisting of 2′-aminoethyl, 2′-fluoro, 2′-O-methyl, 2′-O-methoxyethyl, 2′-aminodiethoxymethanol, 2′-adem, and 2′-deoxy-2′-fhioro-d-arabinonucleic acid. In some embodiments, all of the nucleotides of the loop are modified. In some embodiments, the G in the GAAA sequence comprises a 2′-OH. In some embodiments, each of the nucleotides in the GAAA sequence comprises a 2′-O-methyl modification. In some embodiments, each of the A in the GAAA sequence comprises a 2′-OH and the G in the GAAA sequence comprises a 2′-O-methyl modification. In preferred embodiments, In some embodiments, each of the A in the GAAA sequence comprises a 2′-O-methoxyethyl (MOE) modification and the G in the GAAA sequence comprises a 2′-O-methyl modification; or each of the A in the GAAA sequence comprises a 2′-adem modification and the G in the GAAA sequence comprises a 2′-O-methyl modification. See, e.g., PCT Publication No. WO 2020/206350, the entire contents of which are incorporated herein by reference.

[0150] An exemplary 2′adem modified nucleotide is shown below:

[chemical structure]

[0151] The terms “blunt” or “blunt ended” as used herein in reference to a dsRNA mean that there are no unpaired nucleotides or nucleotide analogs at a given terminal end of a dsRNA, i.e., no nucleotide overhang. One or both ends of a dsRNA can be blunt. Where both ends of a dsRNA are blunt, the dsRNA is said to be blunt ended. To be clear, a “blunt ended” dsRNA is a dsRNA that is blunt at both ends, i.e., no nucleotide overhang at either end of the molecule. Most often such a molecule will be double stranded over its entire length.

[0152] The term “antisense strand” or “guide strand” refers to the strand of an RNAi agent, e.g., a dsRNA, which includes a region that is substantially complementary to a target sequence, e.g., an HTT mRNA.

[0153] As used herein, the term “region of complementarity” refers to the region on the antisense strand that is substantially complementary to a sequence, for example a target sequence, e.g., an HTT nucleotide sequence, as defined herein. Where the region of complementarity is not fully complementary to the target sequence, the mismatches can be in the internal or terminal regions of the molecule. Generally, the most tolerated mismatches are in the terminal regions, e.g., within 5, 4, 3, or 2 nucleotides of the 5′- or 3′-terminus of the RNAi agent. In some embodiments, a double stranded RNA agent of the invention includes a nucleotide mismatch in the antisense strand. In some embodiments, the antisense strand of the double stranded RNA agent of the invention includes no more than 4 mismatches with the target mRNA, e.g., the antisense strand includes 4, 3, 2, 1, or 0 mismatches with the target mRNA. In some embodiments, the antisense strand double stranded RNA agent of the invention includes no more than 4 mismatches with the sense strand, e.g., the antisense strand includes 4, 3, 2, 1, or 0 mismatches wit the sense strand. In some embodiments, a double stranded RNA agent of the invention includes a nucleotide mismatch in the sense strand. In some embodiments, the sense strand of the double stranded RNA agent of the invention includes no more than 4 mismatches with the antisense strand, e.g., the sense strand includes 4, 3, 2, 1, or 0 mismatches with the antisense strand. In some embodiments, the nucleotide mismatch is, for example, within 5, 4, 3 nucleotides from the 3′-end of the iRNA. In another embodiment, the nucleotide mismatch is, for example, in the 3′-terminal nucleotide of the iRNA agent. In some embodiments, the mismatch(s) is not in the seed region.

[0154] Thus, an RNAi agent as described herein can contain one or more mismatches to the target sequence. In one embodiment, an RNAi agent as described herein contains no more than 3 mismatches (i.e., 3, 2, 1, or 0 mismatches). In one embodiment, an RNAi agent as described herein contains no more than 2 mismatches. In one embodiment, an RNAi agent as described herein contains no more than 1 mismatch. In one embodiment, an RNAi agent as described herein contains 0 mismatches. In certain embodiments, if the antisense strand of the RNAi agent contains mismatches to the target sequence, the mismatch can optionally be restricted to be within the last 5 nucleotides from either the 5′- or 3′-end of the region of complementarity. For example, in such embodiments, for a 23 nucleotide RNAi agent, the strand which is complementary to a region of an HTT gene, generally does not contain any mismatch within the central 13 nucleotides. The methods described herein or methods known in the art can be used to determine whether an RNAi agent containing a mismatch to a target sequence is effective in inhibiting the expression of an HTT gene. Consideration of the efficacy of RNAi agents with mismatches in inhibiting expression of an HTT gene is important, especially if the particular region of complementarity in an HTT gene is known to have polymorphic sequence variation within the population.

[0155] The term “sense strand” or “passenger strand” as used herein, refers to the strand of an RNAi agent that includes a region that is substantially complementary to a region of the antisense strand as that term is defined herein.

[0156] As used herein, the term “cleavage region” refers to a region that is located immediately adjacent to the cleavage site. The cleavage site is the site on the target at which cleavage occurs. In some embodiments, the cleavage region comprises three bases on either end of, and immediately adjacent to, the cleavage site. In some embodiments, the cleavage region comprises two bases on either end of, and immediately adjacent to, the cleavage site. In some embodiments, the cleavage site specifically occurs at the site bound by nucleotides 10 and 11 of the antisense strand, and the cleavage region comprises nucleotides 11, 12 and 13.

[0157] As used herein, and unless otherwise indicated, the term “complementary,” when used to describe a first nucleotide sequence in relation to a second nucleotide sequence, refers to the ability of an oligonucleotide or polynucleotide comprising the first nucleotide sequence to hybridize and form a duplex structure under certain conditions with an oligonucleotide or polynucleotide comprising the second nucleotide sequence, as will be understood by the skilled person.

[0158] Complementary sequences within an RNAi agent, e.g., within a dsRNA as described herein, include base-pairing of the oligonucleotide or polynucleotide comprising a first nucleotide sequence to an oligonucleotide or polynucleotide comprising a second nucleotide sequence over the entire length of one or both nucleotide sequences. Such sequences can be referred to as “fully complementary” with respect to each other herein. However, where a first sequence is referred to as “substantially complementary” with respect to a second sequence herein, the two sequences can be fully complementary, or they can form one or more, but generally not more than 5, 4, 3 or 2 mismatched base pairs upon hybridization for a duplex up to 30 base pairs, while retaining the ability to hybridize under the conditions most relevant to their ultimate application, e.g., inhibition of gene expression via a RISC pathway. However, where two oligonucleotides are designed to form, upon hybridization, one or more single stranded overhangs, such overhangs shall not be regarded as mismatches with regard to the determination of complementarity. For example, a dsRNA comprising one oligonucleotide 21 nucleotides in length and another oligonucleotide 23 nucleotides in length, wherein the longer oligonucleotide comprises a sequence of 21 nucleotides that is fully complementary to the shorter oligonucleotide, can yet be referred to as “fully complementary” for the purposes described herein.

[0159] “Complementary” sequences, as used herein, can also include, or be formed entirely from, non-Watson-Crick base pairs or base pairs formed from non-natural and modified nucleotides, in so far as the above requirements with respect to their ability to hybridize are fulfilled. Such non-Watson-Crick base pairs include, but are not limited to, G:U Wobble or Hoogstein base pairing.

[0160] The terms “complementary,” “fully complementary” and “substantially complementary” herein can be used with respect to the base matching between the sense strand and the antisense strand of a dsRNA, or between the antisense strand of an RNAi agent and a target sequence, as will be understood from the context of their use.

[0161] As used herein, a polynucleotide that is “substantially complementary to at least part of” a messenger RNA (mRNA) refers to a polynucleotide that is substantially complementary to a contiguous portion of the mRNA of interest (e.g., an mRNA encoding HTT). For example, a polynucleotide is complementary to at least a part of an HTT mRNA if the sequence is substantially complementary to a non-interrupted portion of an mRNA encoding HTT.

[0162] Accordingly, in some embodiments, the antisense polynucleotides disclosed herein are fully complementary to the target HTT sequence. In other embodiments, the antisense polynucleotides disclosed herein are substantially complementary to the target HTT sequence and comprise a contiguous nucleotide sequence which is at least 80% complementary over its entire length to the equivalent region of the nucleotide sequence of any one of SEQ ID NOs:1-5 and 11, or a fragment of any one of SEQ ID NOs:1-5 and 11, such as about 85%, about 90%, about 91%, about 92%, about 93%, about 94%, about 95%, about 96%, about 97%, about 98%, or about 99% complementary.

[0163] In other embodiments, the antisense polynucleotides disclosed herein are substantially complementary to the target HTT sequence and comprise a contiguous nucleotide sequence which is at least about 80% complementary over its entire length to any one of the sense strand nucleotide sequences in any one of any one of Tables 2-3 and 5-6, or a fragment of any one of the sense strand nucleotide sequences in any one of Tables 2-3 and 5-6, such as about 85%, about 90%, about 91%, about 92%, about 93%, about 94%, about 95%, about 96%, about 97%, about 98%, about 99%, or 100% complementary.

[0164] In one embodiment, an RNAi agent of the disclosure includes a sense strand that is substantially complementary to an antisense polynucleotide which, in turn, is the same as a target HTT sequence, and wherein the sense strand polynucleotide comprises a contiguous nucleotide sequence which is at least about 80% complementary over its entire length to the equivalent region of the nucleotide sequence of SEQ ID NOs: 6-10 and 12, or a fragment of any one of SEQ ID NOs:6-10 and 12, such as about 85%, about 90%, about 91%, about 92%, about 93%, about 94%, about 95%, about 96%, about 97%, about 98%, about 99%, or 100% complementary.

[0165] In some embodiments, the antisense polynucleotides disclosed herein are substantially complementary to a fragment of a target HTT sequence and comprise a contiguous nucleotide sequence which is at least 80% complementary over its entire length to a fragment of SEQ ID NO: 11 selected from the group of nucleotides 5922-5944, 6059-6106; 6059-6084; 6068-6092; 6076-6106; 6191-6231; 6191-6215; 6191-6214; 6192-6215; 6198-6231; or 6198-6224 of SEQ ID NO: 11, such as about 85%, about 90%, about 91%, about 92%, about 93%, about 94%, about 95%, about 96%, about 97%, about 98%, or about 99% complementary.

[0166] In some embodiments, an iRNA of the invention includes a sense strand that is substantially complementary to an antisense polynucleotide which, in turn, is complementary to a target HTT sequence, and wherein the sense strand polynucleotide comprises a contiguous nucleotide sequence which is at least about 80% complementary over its entire length to any one of the antisense strand nucleotide sequences in any one of any one of Tables 2-3 and 5-6, or a fragment of any one of the antisense strand nucleotide sequences in any one of Tables 2-3 and 5-6, such as about 85%, about 90%, about 91%, about 92%, about 93%, about 94%, about 95%, about 96%, about 97%, about 98%, about 99%, or 100% complementary.

[0167] In some embodiments, the sense and antisense strand are selected from any one of the duplexes AD-1718647; AD-1718648; AD-1718649; AD-1718653; AD-1718654 AD-1718655; AD-1718656; AD-1718660; AD-1718662; AD-1718663; AD-1718669; AD-1718670; AD-1718673; AD-1718674; AD-1718676; AD-1718677; AD-1718678; AD-1718679; AD-1718680; AD-1718682; AD-1718683; AD-1718702; AD-1718715; AD-1718717; or AD-1718721.

[0168] In one embodiment, at least partial suppression of the expression of an HTT gene, is assessed by a reduction of the amount of HTT mRNA which can be isolated from or detected in a first cell or group of cells in which an HTT gene is transcribed and which has or have been treated such that the expression of an HTT gene is inhibited, as compared to a second cell or group of cells substantially identical to the first cell or group of cells but which has or have not been so treated (control cells). The degree of inhibition may be expressed in terms of:

$$\frac{( mRNA in control cells ) - ( mRNA in treated cells )}{( mRNA in control cells )} \cdot 100 \%$$

[0169] The phrase “contacting a cell with an RNAi agent,” such as a dsRNA, as used herein, includes contacting a cell by any possible means. Contacting a cell with an RNAi agent includes contacting a cell in vitro with the RNAi agent or contacting a cell in vivo with the RNAi agent. The contacting may be done directly or indirectly. Thus, for example, the RNAi agent may be put into physical contact with the cell by the individual performing the method, or alternatively, the RNAi agent may be put into a situation that will permit or cause it to subsequently come into contact with the cell.

[0170] Contacting a cell in vitro may be done, for example, by incubating the cell with the RNAi agent. Contacting a cell in vivo may be done, for example, by injecting the RNAi agent into or near the tissue where the cell is located, or by injecting the RNAi agent into another area, e.g., the central nervous system (CNS), optionally via intrathecal, intravitreal or other injection, or to the bloodstream or the subcutaneous space, such that the agent will subsequently reach the tissue where the cell to be contacted is located. For example, the RNAi agent may contain or be coupled to a ligand, e.g., a lipophilic moiety or moieties as described below and further detailed, e.g., in PCT/US2019/031170, which is incorporated herein by reference, that directs or otherwise stabilizes the RNAi agent at a site of interest, e.g., the CNS. Combinations of in vitro and in vivo methods of contacting are also possible. For example, a cell may also be contacted in vitro with an RNAi agent and subsequently transplanted into a subject.

[0171] In one embodiment, contacting a cell with an RNAi agent includes “introducing” or “delivering the RNAi agent into the cell” by facilitating or effecting uptake or absorption into the cell. Absorption or uptake of an RNAi agent can occur through unaided diffusive or active cellular processes, or by auxiliary agents or devices. Introducing an RNAi agent into a cell may be in vitro or in vivo. For example, for in vivo introduction, an RNAi agent can be injected into a tissue site or administered systemically. In vitro introduction into a cell includes methods known in the art such as electroporation and lipofection. Further approaches are described herein below or are known in the art.

[0172] The term “lipophile” or “lipophilic moiety” broadly refers to any compound or chemical moiety having an affinity for lipids. One way to characterize the lipophilicity of the lipophilic moiety is by the octanol-water partition coefficient, log K_{ow}, where K_{ow} is the ratio of a chemical's concentration in the octanol-phase to its concentration in the aqueous phase of a two-phase system at equilibrium. The octanol-water partition coefficient is a laboratory-measured property of a substance. However, it may also be predicted by using coefficients attributed to the structural components of a chemical which are calculated using first-principle or empirical methods (see, for example, Tetko et al., J. Chem. Inf. Comput. Sci. 41:1407-21 (2001), which is incorporated herein by reference in its entirety). It provides a thermodynamic measure of the tendency of the substance to prefer a non-aqueous or oily milieu rather than water (i.e. its hydrophilic/lipophilic balance). In principle, a chemical substance is lipophilic in character when its log K_{ow} exceeds 0. Typically, the lipophilic moiety possesses a log K_{ow} exceeding 1, exceeding 1.5, exceeding 2, exceeding 3, exceeding 4, exceeding 5, or exceeding 10. For instance, the log K_{ow} of 6-amino hexanol, for instance, is predicted to be approximately 0.7. Using the same method, the log K_{ow} of cholesteryl N-(hexan-6-ol) carbamate is predicted to be 10.7.

[0173] The lipophilicity of a molecule can change with respect to the functional group it carries. For instance, adding a hydroxyl group or amine group to the end of a lipophilic moiety can increase or decrease the partition coefficient (e.g., log K_{ow}) value of the lipophilic moiety.

[0174] Alternatively, the hydrophobicity of the double-stranded RNAi agent, conjugated to one or more lipophilic moieties, can be measured by its protein binding characteristics. For instance, in certain embodiments, the unbound fraction in the plasma protein binding assay of the double-stranded RNAi agent could be determined to positively correlate to the relative hydrophobicity of the double-stranded RNAi agent, which could then positively correlate to the silencing activity of the double-stranded RNAi agent.

[0175] In one embodiment, the plasma protein binding assay determined is an electrophoretic mobility shift assay (EMSA) using human serum albumin protein. An exemplary protocol of this binding assay is illustrated in detail in, e.g., PCT/US2019/031170. The hydrophobicity of the double-stranded RNAi agent, measured by fraction of unbound siRNA in the binding assay, exceeds 0.15, exceeds 0.2, exceeds 0.25, exceeds 0.3, exceeds 0.35, exceeds 0.4, exceeds 0.45, or exceeds 0.5 for an enhanced in vivo delivery of siRNA.

[0176] Accordingly, conjugating the lipophilic moieties to the internal position(s) of the double-stranded RNAi agent provides optimal hydrophobicity for the enhanced in vivo delivery of siRNA.

[0177] The term “lipid nanoparticle” or “LNP” is a vesicle comprising a lipid layer encapsulating a pharmaceutically active molecule, such as a nucleic acid molecule, e.g., a rNAi agent or a plasmid from which an RNAi agent is transcribed. LNPs are described in, for example, U.S. Pat. Nos. 6,858,225, 6,815,432, 8,158,601, and 8,058,069, the entire contents of which are hereby incorporated herein by reference.

[0178] As used herein, a “subject” is an animal, such as a mammal, including a primate (such as a human, a non-human primate, e.g., a monkey, and a chimpanzee), or a non-primate (such as a a rat, or a mouse). In a preferred embodiment, the subject is a human, such as a human being treated or assessed for a disease, disorder, or condition that would benefit from reduction in HTT expression; a human at risk for a disease, disorder, or condition that would benefit from reduction in HTT expression; a human having a disease, disorder, or condition that would benefit from reduction in HTT expression; or human being treated for a disease, disorder, or condition that would benefit from reduction in HTT expression as described herein. In some embodiments, the subject is a female human. In other embodiments, the subject is a male human. In one embodiment, the subject is an adult subject. In one embodiment, the subject is a pediatric subject. In another embodiment, the subject is a juvenile subject, i.e., a subject below 20 years of age.

[0179] As used herein, the terms “treating” or “treatment” refer to a beneficial or desired result including, but not limited to, alleviation or amelioration of one or more signs or symptoms associated with HTT gene expression or HTT protein production, e.g., HTT-associated diseases, such as Huntington's disease. “Treatment” can also mean prolonging survival as compared to expected survival in the absence of treatment.

[0180] The term “lower” in the context of the level of HTT in a subject or a disease marker or symptom refers to a statistically significant decrease in such level. The decrease can be, for example, at least 10%, 15%, 20%, 25%, 30%, %, 40%, 45%, 50%, 55%, 60%, 65%, 70%, 75%, 80%, 85%, 90%, 95%, or more. In certain embodiments, a decrease is at least 20%. In certain embodiments, the decrease is at least 50% in a disease marker, e.g., protein or gene expression level. “Lower” in the context of the level of HTT in a subject is preferably down to a level accepted as within the range of normal for an individual without such disorder. In certain embodiments, “lower” is the decrease in the difference between the level of a marker or symptom for a subject suffering from a disease and a level accepted within the range of normal for an individual, e.g., the level of decrease in bodyweight between an obese individual and an individual having a weight accepted within the range of normal.

[0181] As used herein, “prevention” or “preventing,” when used in reference to a disease, disorder, or condition thereof, that would benefit from a reduction in expression of an HTT gene or production of an HTT protein, refers to a reduction in the likelihood that a subject will develop a symptom associated with such a disease, disorder, or condition, e.g., a symptom of an HTT-associated disease. The failure to develop a disease, disorder, or condition, or the reduction in the development of a symptom associated with such a disease, disorder, or condition (e.g., by at least about 10% on a clinically accepted scale for that disease or disorder), or the exhibition of delayed symptoms delayed (e.g., by days, weeks, months or years) is considered effective prevention.

[0182] As used herein, the term “HTT-associated disease” or “HTT-associated disorder” is understood as any disease or disorder that would benefit from reduction in the expression and/or activity of HTT. Exemplary HTT-associated diseases include Huntington's disease.

[0183] “Huntington's disease,” also known as HD, Huntington's Chorea, Chorea Maior, Chronic Progressive Chorea, and Hereditary Chorea, is an autosomal dominant genetic disorder characterized by choreiform movements and progressive intellectual deterioration, usually beginning in middle age (35 to 50 yr). The disease affects both sexes equally. The caudate nucleus atrophies, the small-cell population degenerates, and levels of the neurotransmitters gamma-aminobutyric acid (GABA) and substance P decrease. This degeneration results in characteristic “boxcar ventricles” seen on CT scans.

[0184] Symptoms and signs of HD develop insidiously. HD's most obvious symptoms are abnormal body movements called chorea and lack of coordination, but it also affects a number of mental abilities and some aspects of personality. These physical symptoms commonly become noticeable in a person's forties, but can occur at any age. If the age of onset is below 20 years then it is known as Juvenile HD.

[0185] Dementia or psychiatric disturbances, ranging from apathy and irritability to full-blown bipolar or schizophreniform disorder, may precede the movement disorder or develop during its course. Anhedonia or asocial behavior may be the first behavioral manifestation. Motor manifestations include flicking movements of the extremities, a lilting gait, motor impersistence (inability to sustain a motor act, such as tongue protrusion), facial grimacing, ataxia, and dystonia.

[0186] HD is caused by a trinucleotide repeat expansion in the Huntingtin (HTT) gene, and is one of several polyglutamine expansion (or PolyQ expansion) diseases. This produces an extended form of the mutant Huntingtin protein (mHtt), which causes cell death in selective areas of the brain.

[0187] “Therapeutically effective amount,” as used herein, is intended to include the amount of an RNAi agent that, when administered to a subject having an HTT-associated disease, is sufficient to effect treatment of the disease (e.g., by diminishing, ameliorating, or maintaining the existing disease or one or more symptoms of disease). The “therapeutically effective amount” may vary depending on the RNAi agent, how the agent is administered, the disease and its severity and the history, age, weight, family history, genetic makeup, the types of preceding or concomitant treatments, if any, and other individual characteristics of the subject to be treated.

[0188] “Prophylactically effective amount,” as used herein, is intended to include the amount of an RNAi agent that, when administered to a subject having an HTT-associated disorder, is sufficient to prevent or ameliorate the disease or one or more symptoms of the disease. Ameliorating the disease includes slowing the course of the disease or reducing the severity of later-developing disease. The “prophylactically effective amount” may vary depending on the RNAi agent, how the agent is administered, the degree of risk of disease, and the history, age, weight, family history, genetic makeup, the types of preceding or concomitant treatments, if any, and other individual characteristics of the patient to be treated.

[0189] A “therapeutically-effective amount” or “prophylacticaly effective amount” also includes an amount of an RNAi agent that produces some desired local or systemic effect at a reasonable benefit/risk ratio applicable to any treatment. An RNAi agent employed in the methods of the present disclosure may be administered in a sufficient amount to produce a reasonable benefit/risk ratio applicable to such treatment.

[0190] The phrase “pharmaceutically acceptable” is employed herein to refer to those compounds (including salts), materials, compositions, or dosage forms which are, within the scope of sound medical judgment, suitable for use in contact with the tissues of human subjects and animal subjects without excessive toxicity, irritation, allergic response, or other problem or complication, commensurate with a reasonable benefit/risk ratio.

[0191] The phrase “pharmaceutically-acceptable carrier” as used herein means a pharmaceutically-acceptable material, composition or vehicle, such as a liquid or solid filler, diluent, excipient, manufacturing aid (e.g., lubricant, talc magnesium, calcium or zinc stearate, or steric acid), or solvent encapsulating material, involved in carrying or transporting the subject compound from one organ, or portion of the body, to another organ, or portion of the body. Each carrier must be “acceptable” in the sense of being compatible with the other ingredients of the formulation and not injurious to the subject being treated. Some examples of materials which can serve as pharmaceutically-acceptable carriers include: (1) sugars, such as lactose, glucose and sucrose; (2) starches, such as corn starch and potato starch; (3) cellulose, and its derivatives, such as sodium carboxymethyl cellulose, ethyl cellulose and cellulose acetate; (4) powdered tragacanth; (5) malt; (6) gelatin; (7) lubricating agents, such as magnesium state, sodium lauryl sulfate and talc; (8) excipients, such as cocoa butter and suppository waxes; (9) oils, such as peanut oil, cottonseed oil, safflower oil, sesame oil, olive oil, corn oil and soybean oil; (10) glycols, such as propylene glycol; (11) polyols, such as glycerin, sorbitol, mannitol and polyethylene glycol; (12) esters, such as ethyl oleate and ethyl laurate; (13) agar; (14) buffering agents, such as magnesium hydroxide and aluminum hydroxide; (15) alginic acid; (16) pyrogen-free water; (17) isotonic saline; (18) Ringer's solution; (19) ethyl alcohol; (20) pH buffered solutions; (21) polyesters, polycarbonates or polyanhydrides; (22) bulking agents, such as polypeptides and amino acids (23) serum component, such as serum albumin, HDL and LDL; and (22) other non-toxic compatible substances employed in pharmaceutical formulations.

[0192] The term “sample,” as used herein, includes a collection of similar fluids, cells, or tissues isolated from a subject, as well as fluids, cells, or tissues present within a subject. Examples of biological fluids include blood, serum and serosal fluids, plasma, cerebrospinal fluid, ocular fluids, lymph, urine, saliva, and the like. Tissue samples may include samples from tissues, organs or localized regions. For example, samples may be derived from particular organs, parts of organs, or fluids or cells within those organs. In certain embodiments, samples may be derived from the brain (e.g., whole brain or certain segments of brain, e.g., striatum, or certain types of cells in the brain, such as, e.g., neurons and glial cells (astrocytes, oligodendrocytes, microglial cells)). In some embodiments, a “sample derived from a subject” refers to blood drawn from the subject or plasma or serum derived therefrom. In further embodiments, a “sample derived from a subject” refers to brain tissue (or subcomponents thereof) or retinal tissue (or subcomponents thereof) derived from the subject.

### II. RNAi Agents of the Disclosure

[0193] Described herein are RNAi agents which inhibit the expression of an HTT gene. In one embodiment, the RNAi agent includes double stranded ribonucleic acid (dsRNA) molecules for inhibiting the expression of an HTT gene in a cell, such as a cell within a subject, e.g., a mammal, such as a human having an HTT-associated disease, e.g., Huntington's disease. The dsRNA includes an antisense strand having a region of complementarity which is complementary to at least a part of an mRNA formed in the expression of an HTT gene. The region of complementarity is about 15-30 nucleotides or less in length. Upon contact with a cell expressing the HTT gene, the RNAi agent inhibits the expression of the HTT gene (e.g., a human gene, a primate gene, a non-primate gene) by at least 50% as assayed by, for example, a PCR or branched DNA (bDNA)-based method, or by a protein-based method, such as by immunofluorescence analysis, using, for example, western blotting or flow cytometric techniques. In one, the level of knockdown is assayed in Cos7 cells using a Dual-Luciferase assay method.

[0194] A dsRNA includes two RNA strands that are complementary and hybridize to form a duplex structure under conditions in which the dsRNA will be used. One strand of a dsRNA (the antisense strand) includes a region of complementarity that is substantially complementary, and generally fully complementary, to a target sequence. The target sequence can be derived from the sequence of an mRNA formed during the expression of an HTT gene. The other strand (the sense strand) includes a region that is complementary to the antisense strand, such that the two strands hybridize and form a duplex structure when combined under suitable conditions. As described elsewhere herein and as known in the art, the complementary sequences of a dsRNA can also be contained as self-complementary regions of a single nucleic acid molecule, as opposed to being on separate oligonucleotides.

[0195] Generally, the duplex structure is 15 to 30 base pairs in length, e.g., 15-29, 15-28, 15-27, 15-26, 15-25, 15-24, 15-23, 15-22, 15-21, 15-20, 15-19, 15-18, 15-17, 18-30, 18-29, 18-28, 18-27, 18-26, 18-25, 18-24, 18-23, 18-22, 18-21, 18-20, 19-30, 19-29, 19-28, 19-27, 19-26, 19-25, 19-24, 19-23, 19-22, 19-21, 19-20, 20-30, 20-29, 20-28, 20-27, 20-26, 20-25, 20-24, 20-23, 20-22, 20-21, 21-30, 21-29, 21-28, 21-27, 21-26, 21-25, 21-24, 21-23, or 21-22 base pairs in length. In certain preferred embodiments, the duplex structure is 18 to 25 base pairs in length, e.g., 18-25, 18-24, 18-23, 18-22, 18-21, 18-20, 19-25, 19-24, 19-23, 19-22, 19-21, 19-20, 20-25, 20-24, 20-23, 20-22, 20-21, 21-25, 21-24, 21-23, 21-22, 22-25, 22-24, 22-23, 23-25, 23-24 or 24-25 base pairs in length, for example, 19-21 basepairs in length. Ranges and lengths intermediate to the above recited ranges and lengths are also contemplated to be part of the disclosure.

[0196] Similarly, the region of complementarity to the target sequence is 15 to 30 nucleotides in length, e.g., 15-29, 15-28, 15-27, 15-26, 15-25, 15-24, 15-23, 15-22, 15-21, 15-20, 15-19, 15-18, 15-17, 18-30, 18-29, 18-28, 18-27, 18-26, 18-25, 18-24, 18-23, 18-22, 18-21, 18-20, 19-30, 19-29, 19-28, 19-27, 19-26, 19-25, 19-24, 19-23, 19-22, 19-21, 19-20, 20-30, 20-29, 20-28, 20-27, 20-26, 20-25, 20-24,20-23, 20-22, 20-21, 21-30, 21-29, 21-28, 21-27, 21-26, 21-25, 21-24, 21-23, or 21-22 nucleotides in length, for example 19-23 nucleotides in length or 21-23 nucleotides in length. Ranges and lengths intermediate to the above recited ranges and lengths are also contemplated to be part of the disclosure.

[0197] In some embodiments, the duplex structure is 19 to 30 base pairs in length. Similarly, the region of complementarity to the target sequence is 19 to 30 nucleotides in length.

[0198] In some embodiments, the dsRNA is 15 to 23 nucleotides in length, 19 to 23 nucleotides in length, or 25 to 30 nucleotides in length. In general, the dsRNA is long enough to serve as a substrate for the Dicer enzyme. For example, it is well known in the art that dsRNAs longer than about 21-23 nucleotides can serve as substrates for Dicer. As the ordinarily skilled person will also recognize, the region of an RNA targeted for cleavage will most often be part of a larger RNA molecule, often an mRNA molecule. Where relevant, a “part” of an mRNA target is a contiguous sequence of an mRNA target of sufficient length to allow it to be a substrate for RNAi-directed cleavage (i.e., cleavage through a RISC pathway).

[0199] One of skill in the art will also recognize that the duplex region is a primary functional portion of a dsRNA, e.g., a duplex region of about 15 to 36 base pairs, e.g., 15-36, 15-35, 15-34, 15-33, 15-32, 15-31, 15-30, 15-29, 15-28, 15-27, 15-26, 15-25, 15-24, 15-23, 15-22, 15-21, 15-20, 15-19, 15-18, 15-17, 18-30, 18-29, 18-28, 18-27, 18-26, 18-25, 18-24, 18-23, 18-22, 18-21, 18-20, 19-30, 19-29, 19-28, 19-27, 19-26, 19-25, 19-24, 19-23, 19-22, 19-21, 19-20, 20-30, 20-29, 20-28, 20-27, 20-26, 20-25, 20-24, 20-23, 20-22, 20-21, 21-30, 21-29, 21-28, 21-27, 21-26, 21-25, 21-24, 21-23, or 21-22 base pairs, for example, 19-21 base pairs. Thus, in one embodiment, to the extent that it becomes processed to a functional duplex, of e.g., 15-30 base pairs, that targets a desired RNA for cleavage, an RNA molecule or complex of RNA molecules having a duplex region greater than 30 base pairs is a dsRNA. Thus, an ordinarily skilled artisan will recognize that in one embodiment, a miRNA is a dsRNA. In another embodiment, a dsRNA is not a naturally occurring miRNA. In another embodiment, an RNAi agent useful to target HTT expression is not generated in the target cell by cleavage of a larger dsRNA.

[0200] A dsRNA as described herein can further include one or more single-stranded nucleotide overhangs e.g., 1, 2, 3, or 4 nucleotides. A nucleotide overhang can comprise or consist of a nucleotide/nucleoside analog, including a deoxynucleotide/nucleoside. The overhang(s) can be on the sense strand, the antisense strand or any combination thereof. Furthermore, the nucleotide(s) of an overhang can be present on the 5′-end, 3′-end or both ends of either an antisense or sense strand of a dsRNA.

[0201] A dsRNA can be synthesized by standard methods known in the art. Double stranded RNAi compounds of the invention may be prepared using a two-step procedure. First, the individual strands of the double stranded RNA molecule are prepared separately. Then, the component strands are annealed. The individual strands of the siRNA compound can be prepared using solution-phase or solid-phase organic synthesis or both. Organic synthesis offers the advantage that the oligonucleotide strands comprising unnatural or modified nucleotides can be easily prepared. Similarly, single-stranded oligonucleotides of the invention can be prepared using solution-phase or solid-phase organic synthesis or both.

[0202] In one aspect, a dsRNA of the disclosure includes at least two nucleotide sequences, a sense sequence and an antisense sequence. The sense strand sequence for HTT may be selected from the group of sequences provided in any one of Tables 2-3 and 5-6, and the corresponding nucleotide sequence of the antisense strand of the sense strand may be selected from the group of sequences of any one of Tables 2-3 and 5-6. In this aspect, one of the two sequences is complementary to the other of the two sequences, with one of the sequences being substantially complementary to a sequence of an mRNA generated in the expression of an HTT gene. As such, in this aspect, a dsRNA will include two oligonucleotides, where one oligonucleotide is described as the sense strand (passenger strand) in any one of Tables 2-3 and 5-6, and the second oligonucleotide is described as the corresponding antisense strand (guide strand) of the sense strand in any one of Tables 2-3 and 5-6.

[0203] In certain embodiments, the sense or antisense strand is selected from the sense or antisense strand of any one of duplexes AD-1718647; AD-1718648; AD-1718649; AD-1718653; AD-1718654 AD-1718655; AD-1718656; AD-1718660; AD-1718662; AD-1718663; AD-1718669; AD-1718670; AD-1718673; AD-1718674; AD-1718676; AD-1718677; AD-1718678; AD-1718679; AD-1718680; AD-1718682; AD-1718683; AD-1718702; AD-1718715; AD-1718717; or AD-1718721.

[0204] In one embodiment, the substantially complementary sequences of the dsRNA are contained on separate oligonucleotides. In another embodiment, the substantially complementary sequences of the dsRNA are contained on a single oligonucleotide.

[0205] It will be understood that, although some of the sequences in Tables 2-3 and 5-6 are described as modified or conjugated sequences, the RNA of the RNAi agent of the disclosure e.g., a dsRNA of the disclosure, may comprise any one of the sequences set forth in any one of Tables 2-3 and 5-6 that is un-modified, un-conjugated, or modified or conjugated differently than described therein. For example, although the sense strands of the agents of the invention shown in Table 3 are conjugated to a C16 and L96 ligand, these agents may be conjugated to either a C6 moiety or an L96 ligand that directs delivery to the liver, e.g., a GalNAc ligand, as described herein, and not both. A lipophilic ligand can be included in any of the positions provided in the instant application.

[0206] The skilled person is well aware that dsRNAs having a duplex structure of about 20 to 23 base pairs, e.g., 21, base pairs have been hailed as particularly effective in inducing RNA interference (Elbashir et al., (2001) EMBO J., 20:6877-6888). However, others have found that shorter or longer RNA duplex structures can also be effective (Chu and Rana (2007) RNA 14:1714-1719; Kim et al. (2005) Nat Biotech 23:222-226). In the embodiments described above, by virtue of the nature of the oligonucleotide sequences provided herein, dsRNAs described herein can include at least one strand of a length of minimally 21 nucleotides. It can be reasonably expected that shorter duplexes minus only a few nucleotides on one or both ends can be similarly effective as compared to the dsRNAs described above. Hence, dsRNAs having a sequence of at least 15, 16, 17, 18, 19, 20, or more contiguous nucleotides derived from one of the sequences provided herein, and differing in their ability to inhibit the expression of an HTT gene by not more than 10, 15, 20, 25, or 30% inhibition from a dsRNA comprising the full sequence using the in vitro assay with Cos7 and a 10 nM concentration of the RNA agent and the PCR assay as provided in the examples herein, are contemplated to be within the scope of the present disclosure.

[0207] In addition, the RNAs described herein identify a site(s) in an HTT transcript that is susceptible to RISC-mediated cleavage. As such, the present disclosure further features RNAi agents that target within this site(s). As used herein, an RNAi agent is said to target within a particular site of an RNA transcript if the RNAi agent promotes cleavage of the transcript anywhere within that particular site. Such an RNAi agent will generally include at least about 15 contiguous nucleotides, preferably at least 19 nucleotides, from one of the sequences provided herein coupled to additional nucleotide sequences taken from the region contiguous to the selected sequence in an HTT gene.

### III. Modified RNAi Agents of the Disclosure

[0208] In one embodiment, the RNA of the RNAi agent of the disclosure e.g., a dsRNA, is un-modified, and does not comprise, e.g., chemical modifications or conjugations known in the art and described herein. In preferred embodiments, the RNA of an RNAi agent of the disclosure, e.g., a dsRNA, is chemically modified to enhance stability or other beneficial characteristics. In certain embodiments of the disclosure, substantially all of the nucleotides of an RNAi agent of the disclosure are modified. In other embodiments of the disclosure, all of the nucleotides of an RNAi agent of the disclosure are modified. RNAi agents of the disclosure in which “substantially all of the nucleotides are modified” are largely but not wholly modified and can include not more than 5, 4, 3, 2, or unmodified nucleotides. In still other embodiments of the disclosure, RNAi agents of the disclosure can include not more than 5, 4, 3, 2 or 1 modified nucleotides.

[0209] The nucleic acids featured in the disclosure can be synthesized or modified by methods well established in the art, such as those described in “Current protocols in nucleic acid chemistry,” Beaucage, S. L. et al. (Edrs.), John Wiley & Sons, Inc., New York, NY, USA, which is hereby incorporated herein by reference. Modifications include, for example, end modifications, e.g., 5′-end modifications (phosphorylation, conjugation, inverted linkages) or 3′-end modifications (conjugation, DNA nucleotides, inverted linkages, etc.); base modifications, e.g., replacement with stabilizing bases, destabilizing bases, or bases that base pair with an expanded repertoire of partners, removal of bases (abasic nucleotides), or conjugated bases; sugar modifications (e.g., at the 2′-position or 4′-position) or replacement of the sugar; or backbone modifications, including modification or replacement of the phosphodiester linkages. Specific examples of RNAi agents useful in the embodiments described herein include, but are not limited to, RNAs containing modified backbones or no natural internucleoside linkages. RNAs having modified backbones include, among others, those that do not have a phosphorus atom in the backbone. For the purposes of this specification, and as sometimes referenced in the art, modified RNAs that do not have a phosphorus atom in their internucleoside backbone can also be considered to be oligonucleosides. In some embodiments, a modified RNAi agent will have a phosphorus atom in its internucleoside backbone.

[0210] Modified RNA backbones include, for example, phosphorothioates, chiral phosphorothioates, phosphorodithioates, phosphotriesters, aminoalkylphosphotriesters, methyl and other alkyl phosphonates including 3′-alkylene phosphonates and chiral phosphonates, phosphinates, phosphoramidates including 3′-amino phosphoramidate and aminoalkylphosphoramidates, thionophosphoramidates, thionoalkylphosphonates, thionoalkylphosphotriesters, and boranophosphates having normal 3′-5′ linkages, 2′-5′-linked analogs of these, and those having inverted polarity wherein the adjacent pairs of nucleoside units are linked 3′-5′ to 5′-3′ or 2′-5′ to 5′-2′. Various salts, mixed salts and free acid forms are also included. In some embodiments of the invention, the dsRNA agents of the invention are in a free acid form. In other embodiments of the invention, the dsRNA agents of the invention are in a salt form. In one embodiment, the dsRNA agents of the invention are in a sodium salt form. In certain embodiments, when the dsRNA agents of the invention are in the sodium salt form, sodium ions are present in the agent as counterions for substantially all of the phosphodiester and/or phosphorothiotate groups present in the agent. Agents in which substantially all of the phosphodiester and/or phosphorothioate linkages have a sodium counterion include not more than 5, 4, 3, 2, or 1 phosphodiester and/or phosphorothioate linkages without a sodium counterion. In some embodiments, when the dsRNA agents of the invention are in the sodium salt form, sodium ions are present in the agent as counterions for all of the phosphodiester and/or phosphorothiotate groups present in the agent.

[0211] Representative U.S. patents that teach the preparation of the above phosphorus-containing linkages include, but are not limited to, U.S. Pat. Nos. 3,687,808; 4,469,863; 4,476,301; 5,023,243; 5,177,195; 5,188,897; 5,264,423; 5,276,019; 5,278,302; 5,286,717; 5,321,131; 5,399,676; 5,405,939; 5,453,496; 5,455,233; 5,466,677; 5,476,925; 5,519,126; 5,536,821; 5,541,316; 5,550,111; 5,563,253; 5,571,799; 5,587,361; 5,625,050; 6,028,188; 6,124,445; 6,160,109; 6,169,170; 6,172,209; 6,239,265; 6,277,603; 6,326,199; 6,346,614; 6,444,423; 6,531,590; 6,534,639; 6,608,035; 6,683,167; 6,858,715; 6,867,294; 6,878,805; 7,015,315; 7,041,816; 7,273,933; 7,321,029; and U.S. Pat. RE39464, the entire contents of each of which are hereby incorporated herein by reference.

[0212] Modified RNA backbones that do not include a phosphorus atom therein have backbones that are formed by short chain alkyl or cycloalkyl internucleoside linkages, mixed heteroatoms and alkyl or cycloalkyl internucleoside linkages, or one or more short chain heteroatomic or heterocyclic internucleoside linkages. These include those having morpholino linkages (formed in part from the sugar portion of a nucleoside); siloxane backbones; sulfide, sulfoxide and sulfone backbones; formacetyl and thioformacetyl backbones; methylene formacetyl and thioformacetyl backbones; alkene containing backbones; sulfamate backbones; methyleneimino and methylenehydrazino backbones; sulfonate and sulfonamide backbones; amide backbones; and others having mixed N, O, S and CH2 component parts.

[0213] Representative U.S. patents that teach the preparation of the above oligonucleosides include, but are not limited to, U.S. Pat. Nos. 5,034,506; 5,166,315; 5,185,444; 5,214,134; 5,216,141; 5,235,033; 5,64,562; 5,264,564; 5,405,938; 5,434,257; 5,466,677; 5,470,967; 5,489,677; 5,541,307; 5,561,225; 5,596,086; 5,602,240; 5,608,046; 5,610,289; 5,618,704; 5,623,070; 5,663,312; 5,633,360; 5,677,437; and, 5,677,439, the entire contents of each of which are hereby incorporated herein by reference.

[0214] In other embodiments, suitable RNA mimetics are contemplated for use in RNAi agents, in which both the sugar and the internucleoside linkage, i.e., the backbone, of the nucleotide units are replaced with novel groups. The base units are maintained for hybridization with an appropriate nucleic acid target compound. One such oligomeric compound, a RNA mimetic that has been shown to have excellent hybridization properties, is referred to as a peptide nucleic acid (PNA). In PNA compounds, the sugar backbone of an RNA is replaced with an amide containing backbone, in particular an aminoethylglycine backbone. The nucleobases are retained and are bound directly or indirectly to aza nitrogen atoms of the amide portion of the backbone. Representative U.S. patents that teach the preparation of PNA compounds include, but are not limited to, U.S. Pat. Nos. 5,539,082; 5,714,331; and 5,719,262, the entire contents of each of which are hereby incorporated herein by reference. Additional PNA compounds suitable for use in the RNAi agents of the disclosure are described in, for example, in Nielsen et al., Science, 1991, 254, 1497-1500.

[0215] Some embodiments featured in the disclosure include RNAs with phosphorothioate backbones and oligonucleosides with heteroatom backbones, and in particular —CH₂—NH—CH₂—, —CH₂—N(CH₃)—O—CH₂— [known as a methylene (methylimino) or MMI backbone], —CH₂—O—N(CH₃)—CH₂—, —CH₂—N(CH₃)—N(CH₃)—CH₂— and —N(CH₃)—CH₂—CH₂— [wherein the native phosphodiester backbone is represented as —O—P—O—CH₂—] of the above-referenced U.S. Pat. No. 5,489,677, and the amide backbones of the above-referenced U.S. Pat. No. 5,602,240. In some embodiments, the RNAs featured herein have morpholino backbone structures of the above-referenced U.S. Pat. No. 5,034,506.

[0216] Modified RNAs can also contain one or more substituted sugar moieties. The RNAi agents, e.g., dsRNAs, featured herein can include one of the following at the 2′-position: OH; F; O—, S—, or N-alkyl; O—, S—, or N-alkenyl; O—, S- or N-alkynyl; or O-alkyl-O-alkyl, wherein the alkyl, alkenyl and alkynyl can be substituted or unsubstituted C₁ to C₁₀ alkyl or C₂ to C₁₀ alkenyl and alkynyl. Exemplary suitable modifications include O[(CH₂)ₙO]ₘCH₃, O(CH₂)ₙOCH₃, O(CH₂)ₙNH₂, O(CH₂)ₙCH₃, O(CH₂)ₙONH₂, and O(CH₂)ₙON[(CH₂)ₙCH₃)]₂, where n and m are from 1 to about 10. In other embodiments, dsRNAs include one of the following at the 2′ position: C₁ to C₁₀ lower alkyl, substituted lower alkyl, alkaryl, aralkyl, O-alkaryl or O-aralkyl, SH, SCH₃, OCN, Cl, Br, CN, CF₃, OCF₃, SOCH₃, SO₂CH₃, ONO₂, NO₂, N₃, NH₂, heterocycloalkyl, heterocycloalkaryl, aminoalkylamino, polyalkylamino, substituted silyl, an RNA cleaving group, a reporter group, an intercalator, a group for improving the pharmacokinetic properties of an RNAi agent, or a group for improving the pharmacodynamic properties of an RNAi agent, and other substituents having similar properties. In some embodiments, the modification includes a 2′-methoxyethoxy (2′-O—CH₂CH₂OCH₃, also known as 2′-O-(2-methoxyethyl) or 2′-MOE) (Martin et al., Helv. Chim. Acta, 1995, 78:486-504) i.e., an alkoxy-alkoxy group. Another exemplary modification is 2′-dimethylaminooxyethoxy, i.e., a O(CH₂)₂ON(CH₃)₂ group, also known as 2′-DMAOE, as described in examples herein below, and 2′-dimethylaminoethoxyethoxy (also known in the art as 2′-O-dimethylaminoethoxyethyl or 2′-DMAEOE), i.e., 2′-O—CH₂—O—CH₂—N(CH₂)₂. Further exemplary modifications include: 5′-Me-2′-F nucleotides, 5′-Me-2′-OMe nucleotides, 5′-Me-2′-deoxynucleotides, (both R and S isomers in these three families); 2′-alkoxyalkyl; and 2′-NMA (N-methylacetamide).

[0217] Other modifications include 2′-methoxy (2′-OCH₃), 2′-aminopropoxy (2′-OCH₂CH₂CH₂NH₂), 2′-O-hexadecyl, and 2′-fluoro (2′-F). Similar modifications can also be made at other positions on the RNA of an RNAi agent, particularly the 3′ position of the sugar on the 3′ terminal nucleotide or in 2′-5′ linked dsRNAs and the 5′ position of 5′ terminal nucleotide. RNAi agents can also have sugar mimetics such as cyclobutyl moieties in place of the pentofuranosyl sugar. Representative U.S. patents that teach the preparation of such modified sugar structures include, but are not limited to, U.S. Pat. Nos. 4,981,957; 5,118,800; 5,319,080; 5,359,044; 5,393,878; 5,446,137; 5,466,786; 5,514,785; 5,519,134; 5,567,811; 5,576,427; 5,591,722; 5,597,909; 5,610,300; 5,627,053; 5,639,873; 5,646,265; 5,658,873; 5,670,633; and 5,700,920, certain of which are commonly owned with the instant application. The entire contents of each of the foregoing are hereby incorporated herein by reference.

[0218] An RNAi agent of the disclosure can also include nucleobase (often referred to in the art simply as “base”) modifications or substitutions. As used herein, “unmodified” or “natural” nucleobases include the purine bases adenine (A) and guanine (G), and the pyrimidine bases thymine (T), cytosine (C) and uracil (U). Modified nucleobases include other synthetic and natural nucleobases such as 5-methylcytosine (5-me-C), 5-hydroxymethyl cytosine, xanthine, hypoxanthine, 2-aminoadenine, 6-methyl and other alkyl derivatives of adenine and guanine, 2-propyl and other alkyl derivatives of adenine and guanine, 2-thiouracil, 2-thiothymine and 2-thiocytosine, 5-halouracil and cytosine, 5-propynyl uracil and cytosine, 6-azo uracil, cytosine and thymine, 5-uracil (pseudouracil), 4-thiouracil, 8-halo, 8-amino, 8-thiol, 8-thioalkyl, 8-hydroxyl anal other 8-substituted adenines and guanines, 5-halo, particularly 5-bromo, 5-trifluoromethyl and other 5-substituted uracils and cytosines, 7-methylguanine and 7-methyladenine, 8-azaguanine and 8-azaadenine, 7-deazaguanine and 7-daazaadenine and 3-deazaguanine and 3-deazaadenine. Further nucleobases include those disclosed in U.S. Pat. No. 3,687,808, those disclosed in Modified Nucleosides in Biochemistry, Biotechnology and Medicine, Herdewijn, P. ed. Wiley-VCH, 2008; those disclosed in The Concise Encyclopedia Of Polymer Science And Engineering, pages 858-859, Kroschwitz, J. L, ed. John Wiley & Sons, 1990, these disclosed by Englisch et al., (1991) Angewandte Chemie, International Edition, 30:613, and those disclosed by Sanghvi, Y S., Chapter 15, dsRNA Research and Applications, pages 289-302, Crooke, S. T. and Lebleu, B., Ed., CRC Press, 1993. Certain of these nucleobases are particularly useful for increasing the binding affinity of the oligomeric compounds featured in the disclosure. These include 5-substituted pyrimidines, 6-azapyrimidines and N-2, N-6 and 0-6 substituted purines, including 2-aminopropyladenine, 5-propynyluracil and 5-propynylcytosine. 5-methylcytosine substitutions have been shown to increase nucleic acid duplex stability by 0.6-1.2° C. (Sanghvi, Y. S., Crooke, S. T. and Lebleu, B., Eds., dsRNA Research and Applications, CRC Press, Boca Raton, 1993, pp. 276-278) and are exemplary base substitutions, even more particularly when combined with 2′-O-methoxyethyl sugar modifications.

[0219] Representative U.S. patents that teach the preparation of certain of the above noted modified nucleobases as well as other modified nucleobases include, but are not limited to, the above noted U.S. Pat. Nos. 3,687,808, 4,845,205; 5,130,30; 5,134,066; 5,175,273; 5,367,066; 5,432,272; 5,457,187; 5,459,255; 5,484,908; 5,502,177; 5,525,711; 5,552,540; 5,587,469; 5,594,121, 5,596,091; 5,614,617; 5,681,941; 5,750,692; 6,015,886; 6,147,200; 6,166,197; 6,222,025; 6,235,887; 6,380,368; 6,528,640; 6,639,062; 6,617,438; 7,045,610; 7,427,672; and 7,495,088, the entire contents of each of which are hereby incorporated herein by reference.

[0220] In some embodiments, an RNAi agent of the disclosure can also be modified to include one or more bicyclic sugar moieties. A “bicyclic sugar” is a furanosyl ring modified by a ring formed by the bridging of two carbons, whether adjacent or non-adjacent. A “bicyclic nucleoside” (“BNA”) is a nucleoside having a sugar moiety comprising a ring formed by bridging two carbons, whether adjacent or non-adjacent, of the sugar ring, thereby forming a bicyclic ring system. In certain embodiments, the bridge connects the 4′-carbon and the 2′-carbon of the sugar ring, optionally, via the 2′-acyclic oxygen atom. Thus, in some embodiments an agent of the invention may include one or more locked nucleic acids (LNA). A locked nucleic acid is a nucleotide having a modified ribose moiety in which the ribose moiety comprises an extra bridge connecting the 2′ and 4′ carbons. In other words, an LNA is a nucleotide comprising a bicyclic sugar moiety comprising a 4′-CH₂—O-2′ bridge. This structure effectively “locks” the ribose in the 3′-endo structural conformation. The addition of locked nucleic acids to siRNAs has been shown to increase siRNA stability in serum, and to reduce off-target effects (Elmen, J. et al., (2005) Nucleic Acids Research 33(1):439-447; Mook, OR. et al., (2007) Mol Canc Ther 6(3):833-843; Grunweller, A. et al., (2003) Nucleic Acids Research 31(12):3185-3193). Examples of bicyclic nucleosides for use in the polynucleotides of the invention include without limitation nucleosides comprising a bridge between the 4′ and the 2′ ribosyl ring atoms. In certain embodiments, the antisense polynucleotide agents of the invention include one or more bicyclic nucleosides comprising a 4′ to 2′ bridge.

[0221] A locked nucleoside can be represented by the structure (omitting stereochemistry),

[chemical structure]

wherein B is a nucleobase or modified nucleobase and L is the linking group that joins the 2′-carbon to the 4′-carbon of the ribose ring. Examples of such 4′ to 2′ bridged bicyclic nucleosides, include but are not limited to 4′-(CH₂)—O-2′ (LNA); 4′-(CH₂)—S-2′; 4′-(CH₂)₂-O-2′ (ENA); 4′-CH(CH₃)—O-2′ (also referred to as “constrained ethyl” or “cEt”) and 4′-CH(CH₂OCH₃)—O-2′ (and analogs thereof; see, e.g., U.S. Pat. No. 7,399,845); 4′-C(CH₃)(CH₃)—O-2′ (and analogs thereof; see e.g., U.S. Pat. No. 8,278,283); 4′-CH₂—N(OCH₃)-2′ (and analogs thereof; see e.g., U.S. Pat. No. 8,278,425); 4′-CH₂—O—N(CH₃)-2′ (see, e.g., U.S. Patent Publication No. 2004/0171570); 4′-CH₂—N(R)—O-2′, wherein R is H, C1-C12 alkyl, or a nitrogen protecting group (see, e.g., U.S. Pat. No. 7,427,672); 4′-CH₂—C(H)(CH₃)-2′ (see, e.g., Chattopadhyaya et al., J. Org. Chem., 2009, 74, 118-134); and 4′-CH₂—C(═CH₂)-2′ (and analogs thereof; see, e.g., U.S. Pat. No. 8,278,426). The entire contents of each of the foregoing are hereby incorporated herein by reference.

[0222] Additional representative U.S. Patents and U.S. Patent Publications that teach the preparation of locked nucleic acid nucleotides include, but are not limited to, the following: U.S. Pat. Nos. 6,268,490; 6,525,191; 6,670,461; 6,770,748; 6,794,499; 6,998,484; 7,053,207; 7,034,133; 7,084,125; 7,399,845; 7,427,672; 7,569,686; 7,741,457; 8,022,193; 8,030,467; 8,278,425; 8,278,426; 8,278,283; US 2008/0039618; and US 2009/0012281, the entire contents of each of which are hereby incorporated herein by reference.

[0223] Any of the foregoing bicyclic nucleosides can be prepared having one or more stereochemical sugar configurations including for example α-L-ribofuranose and β-D-ribofuranose (see WO 99/14226).

[0224] The RNA of an iRNA can also be modified to include one or more constrained ethyl nucleotides. As used herein, a “constrained ethyl nucleotide” or “cEt” is a locked nucleic acid comprising a bicyclic sugar moiety comprising a 4′-CH(CH3)-O-2′ bridge (i.e., L in the preceding structure). In one embodiment, a constrained ethyl nucleotide is in the S conformation referred to herein as “S-cEt.”

[0225] An iRNA of the invention may also include one or more “conformationally restricted nucleotides” (“CRN”). CRN are nucleotide analogs with a linker connecting the C2′ and C4′ carbons of ribose or the C3 and —C5′ carbons of ribose. CRN lock the ribose ring into a stable conformation and increase the hybridization affinity to mRNA. The linker is of sufficient length to place the oxygen in an optimal position for stability and affinity resulting in less ribose ring puckering.

[0226] Representative publications that teach the preparation of certain of the above noted CRN include, but are not limited to, U.S. Patent Publication No. 2013/0190383; and PCT publication WO 2013/036868, the entire contents of each of which are hereby incorporated herein by reference.

[0227] In some embodiments, an iRNA of the invention comprises one or more monomers that are UNA (unlocked nucleic acid) nucleotides. UNA is unlocked acyclic nucleic acid, wherein any of the bonds of the sugar has been removed, forming an unlocked “sugar” residue. In one example, UNA also encompasses monomer with bonds between C1′-C4′ have been removed (i.e. the covalent carbon-oxygen-carbon bond between the C1′ and C4′ carbons). In another example, the C2′-C3′ bond (i.e. the covalent carbon-carbon bond between the C2′ and C3′ carbons) of the sugar has been removed (see Nuc. Acids Symp. Series, 52, 133-134 (2008) and Fluiter et al., Mol. Biosyst., 2009, 10, 1039 hereby incorporated by reference).

[0228] Representative U.S. publications that teach the preparation of UNA include, but are not limited to, U.S. Pat. No. 8,314,227; and U.S. Patent Publication Nos. 2013/0096289; 2013/0011922; and 2011/0313020, the entire contents of each of which are hereby incorporated herein by reference.

[0229] Potentially stabilizing modifications to the ends of RNA molecules can include N-(acetylaminocaproyl)-4-hydroxyprolinol (Hyp-C6-NHAc), N-(caproyl-4-hydroxyprolinol (Hyp-C6), N-(acetyl-4-hydroxyprolinol (Hyp-NHAc), thymidine-2′-O-deoxythymidine (ether), N-(aminocaproyl)-4-hydroxyprolinol (Hyp-C6-amino), 2-docosanoyl-uridine-3′-phosphate, inverted 2′-deoxy-modified ribonucleotide, such as inverted dT(idT), inverted dA (idA), and inverted abasic 2′-deoxyribonucleotide (iAb) and others. Disclosure of this modification can be found in WO 2011/005861.

[0230] In one example, the 3′ or 5′ terminal end of a oligonucleotide is linked to an inverted 2′-deoxy-modified ribonucleotide, such as inverted dT(idT), inverted dA (idA), or a inverted abasic 2′-deoxyribonucleotide (iAb). In one particular example, the inverted 2′-deoxy-modified ribonucleotide is linked to the 3′end of an oligonucleotide, such as the 3′-end of a sense strand described herein, where the linking is via a 3′-3′ phosphodiester linkage or a 3′-3′-phosphorothioate linkage.

[0231] In another example, the 3′-end of a sense strand is linked via a 3′-3′-phosphorothioate linkage to an inverted abasic ribonucleotide (iAb). In another example, the 3′-end of a sense strand is linked via a 3′-3′-phosphorothioate linkage to an inverted dA (idA).

[0232] In one particular example, the inverted 2′-deoxy-modified ribonucleotide is linked to the 3′end of an oligonucleotide, such as the 3′-end of a sense strand described herein, where the linking is via a 3′-3′ phosphodiester linkage or a 3′-3′-phosphorothioate linkage.

[0233] In another example, the 3′-terminal nucleotides of a sense strand is an inverted dA (idA) and is linked to the preceding nucleotide via a 3′-3′-linkage (e.g., 3′-3′-phosphorothioate linkage).

[0234] Other modifications of the nucleotides of an iRNA of the invention include a 5′ phosphate or 5′ phosphate mimic, e.g., a 5′-terminal phosphate or phosphate mimic on the antisense strand of an iRNA. Suitable phosphate mimics are disclosed in, for example U.S. Patent Publication No. 2012/0157511, the entire contents of which are incorporated herein by reference.

### A. Modified RNAi Agents Comprising Motifs of the Disclosure

[0235] In certain aspects of the disclosure, the double-stranded RNAi agents of the disclosure include agents with chemical modifications as disclosed, for example, in WO 2013/075035, the entire contents of which are incorporated herein by reference. As shown herein and in WO 2013/075035, a superior result may be obtained by introducing one or more motifs of three identical modifications on three consecutive nucleotides into a sense strand or antisense strand of an RNAi agent, particularly at or near the cleavage site. In some embodiments, the sense strand and antisense strand of the RNAi agent may otherwise be completely modified. The introduction of these motifs interrupts the modification pattern, if present, of the sense or antisense strand. The RNAi agent may be optionally conjugated with a lipophilic ligand, e.g., a C16 ligand, for instance on the sense strand. The RNAi agent may be optionally modified with a (S)-glycol nucleic acid (GNA) modification, for instance on one or more residues of the antisense strand. The resulting RNAi agents present superior gene silencing activity.

[0236] Accordingly, the disclosure provides double stranded RNAi agents capable of inhibiting the expression of a target gene (i.e., an HTT gene) in vivo. The RNAi agent comprises a sense strand and an antisense strand. Each strand of the RNAi agent may be 15-30 nucleotides in length. For example, each strand may be 16-30 nucleotides in length, 17-30 nucleotides in length, 25-30 nucleotides in length, 27-30 nucleotides in length, 17-23 nucleotides in length, 17-21 nucleotides in length, 17-19 nucleotides in length, 19-25 nucleotides in length, 19-23 nucleotides in length, 19-21 nucleotides in length, 21-25 nucleotides in length, or 21-23 nucleotides in length. In certain embodiments, each strand is 19-23 nucleotides in length.

[0237] The sense strand and antisense strand typically form a duplex double stranded RNA (“dsRNA”), also referred to herein as an “RNAi agent.” The duplex region of an RNAi agent may be 15-30 nucleotide pairs in length. For example, the duplex region can be 16-30 nucleotide pairs in length, 17-30 nucleotide pairs in length, 27-30 nucleotide pairs in length, 17-23 nucleotide pairs in length, 17-21 nucleotide pairs in length, 17-19 nucleotide pairs in length, 19-25 nucleotide pairs in length, 19-23 nucleotide pairs in length, 19-21 nucleotide pairs in length, 21-25 nucleotide pairs in length, or 21-23 nucleotide pairs in length. In another example, the duplex region is selected from 15, 16, 17, 18, 19, 20, 21, 22, 23, 24, 25, 26, and 27 nucleotides in length. In preferred embodiments, the duplex region is 19-21 nucleotide pairs in length.

[0238] In one embodiment, the RNAi agent may contain one or more overhang regions or capping groups at the 3′-end, 5′-end, or both ends of one or both strands. The overhang can be 1-6 nucleotides in length, for instance 2-6 nucleotides in length, 1-5 nucleotides in length, 2-5 nucleotides in length, 1-4 nucleotides in length, 2-4 nucleotides in length, 1-3 nucleotides in length, 2-3 nucleotides in length, or 1-2 nucleotides in length. In preferred embodiments, the nucleotide overhang region is 2 nucleotides in length. The overhangs can be the result of one strand being longer than the other, or the result of two strands of the same length being staggered. The overhang can form a mismatch with the target mRNA or it can be complementary to the gene sequences being targeted or can be another sequence. The first and second strands can also be joined, e.g., by additional bases to form a hairpin, or by other non-base linkers.

[0239] In one embodiment, the nucleotides in the overhang region of the RNAi agent can each independently be a modified or unmodified nucleotide including, but no limited to 2′-sugar modified, such as, 2-F, 2′-O-methyl, thymidine (T), and any combinations thereof.

[0240] For example, TT can be an overhang sequence for either end on either strand. The overhang can form a mismatch with the target mRNA or it can be complementary to the gene sequences being targeted or can be another sequence.

[0241] The 5′- or 3′-overhangs at the sense strand, antisense strand or both strands of the RNAi agent may be phosphorylated. In some embodiments, the overhang region(s) contains two nucleotides having a phosphorothioate between the two nucleotides, where the two nucleotides can be the same or different. In one embodiment, the overhang is present at the 3′-end of the sense strand, antisense strand, or both strands. In one embodiment, this 3′-overhang is present in the antisense strand. In one embodiment, this 3′-overhang is present in the sense strand.

[0242] The RNAi agent may contain only a single overhang, which can strengthen the interference activity of the RNAi, without affecting its overall stability. For example, the single-stranded overhang may be located at the 3-terminal end of the sense strand or, alternatively, at the 3′-terminal end of the antisense strand. The RNAi may also have a blunt end, located at the 5′-end of the antisense strand (or the 3′-end of the sense strand) or vice versa. Generally, the antisense strand of the RNAi has a nucleotide overhang at the 3′-end, and the 5′-end is blunt. While not wishing to be bound by theory, the asymmetric blunt end at the 5′-end of the antisense strand and 3′-end overhang of the antisense strand favor the guide strand loading into RISC process.

[0243] In one embodiment, the RNAi agent is a double ended bluntmer of 19 nucleotides in length, wherein the sense strand contains at least one motif of three 2′-F modifications on three consecutive nucleotides at positions 7, 8, 9 from the 5′end. The antisense strand contains at least one motif of three 2′-O-methyl modifications on three consecutive nucleotides at positions 11, 12, 13 from the 5′end.

[0244] In another embodiment, the RNAi agent is a double ended bluntmer of 20 nucleotides in length, wherein the sense strand contains at least one motif of three 2′-F modifications on three consecutive nucleotides at positions 8, 9, 10 from the 5′end. The antisense strand contains at least one motif of three 2′-O-methyl modifications on three consecutive nucleotides at positions 11, 12, 13 from the 5′end.

[0245] In yet another embodiment, the RNAi agent is a double ended bluntmer of 21 nucleotides in length, wherein the sense strand contains at least one motif of three 2′-F modifications on three consecutive nucleotides at positions 9, 10, 11 from the 5′end. The antisense strand contains at least one motif of three 2′-O-methyl modifications on three consecutive nucleotides at positions 11, 12, 13 from the 5′end.

[0246] In one embodiment, the RNAi agent comprises a 21 nucleotide sense strand and a 23 nucleotide antisense strand, wherein the sense strand contains at least one motif of three 2′-F modifications on three consecutive nucleotides at positions 9, 10, 11 from the 5′end; the antisense strand contains at least one motif of three 2′-O-methyl modifications on three consecutive nucleotides at positions 11, 12, 13 from the 5′end, wherein one end of the RNAi agent is blunt, while the other end comprises a 2 nucleotide overhang. Preferably, the 2 nucleotide overhang is at the 3′-end of the antisense strand. When the 2 nucleotide overhang is at the 3′-end of the antisense strand, there may be two phosphorothioate internucleotide linkages between the terminal three nucleotides, wherein two of the three nucleotides are the overhang nucleotides, and the third nucleotide is a paired nucleotide next to the overhang nucleotide. In one embodiment, the RNAi agent additionally has two phosphorothioate internucleotide linkages between the terminal three nucleotides at both the 5′-end of the sense strand and at the 5′-end of the antisense strand. In one embodiment, every nucleotide in the sense strand and the antisense strand of the RNAi agent, including the nucleotides that are part of the motifs are modified nucleotides. In one embodiment each residue is independently modified with a 2′-O-methyl or 3′-fluoro, e.g., in an alternating motif. Optionally, the RNAi agent further comprises a ligand (e.g., a lipophilic ligand, optionally a C16 ligand).

[0247] In one embodiment, the RNAi agent comprises a sense and an antisense strand, wherein the sense strand is 25-30 nucleotide residues in length, wherein starting from the 5′ terminal nucleotide (position 1) positions 1 to 23 of the first strand comprise at least 8 ribonucleotides; the antisense strand is 36-66 nucleotide residues in length and, starting from the 3′ terminal nucleotide, comprises at least 8 ribonucleotides in the positions paired with positions 1-23 of sense strand to form a duplex; wherein at least the 3′ terminal nucleotide of antisense strand is unpaired with sense strand, and up to 6 consecutive 3′ terminal nucleotides are unpaired with sense strand, thereby forming a 3′ single stranded overhang of 1-6 nucleotides; wherein the 5′ terminus of antisense strand comprises from 10-30 consecutive nucleotides which are unpaired with sense strand, thereby forming a 10-30 nucleotide single stranded 5′ overhang; wherein at least the sense strand 5′ terminal and 3′ terminal nucleotides are base paired with nucleotides of antisense strand when sense and antisense strands are aligned for maximum complementarity, thereby forming a substantially duplexed region between sense and antisense strands; and antisense strand is sufficiently complementary to a target RNA along at least 19 ribonucleotides of antisense strand length to reduce target gene expression when the double stranded nucleic acid is introduced into a mammalian cell; and wherein the sense strand contains at least one motif of three 2′-F modifications on three consecutive nucleotides, where at least one of the motifs occurs at or near the cleavage site. The antisense strand contains at least one motif of three 2′-O-methyl modifications on three consecutive nucleotides at or near the cleavage site.

[0248] In one embodiment, the RNAi agent comprises sense and antisense strands, wherein the RNAi agent comprises a first strand having a length which is at least 25 and at most 29 nucleotides and a second strand having a length which is at most 30 nucleotides with at least one motif of three 2′-O-methyl modifications on three consecutive nucleotides at position 11, 12, 13 from the 5′ end; wherein the 3′ end of the first strand and the 5′ end of the second strand form a blunt end and the second strand is 1-4 nucleotides longer at its 3′ end than the first strand, wherein the duplex region region which is at least 25 nucleotides in length, and the second strand is sufficiently complemenatary to a target mRNA along at least 19 nucleotide of the second strand length to reduce target gene expression when the RNAi agent is introduced into a mammalian cell, and wherein dicer cleavage of the RNAi agent preferentially results in an siRNA comprising the 3′ end of the second strand, thereby reducing expression of the target gene in the mammal. Optionally, the RNAi agent further comprises a ligand.

[0249] In one embodiment, the sense strand of the RNAi agent contains at least one motif of three identical modifications on three consecutive nucleotides, where one of the motifs occurs at the cleavage site in the sense strand.

[0250] In one embodiment, the antisense strand of the RNAi agent can also contain at least one motif of three identical modifications on three consecutive nucleotides, where one of the motifs occurs at or near the cleavage site in the antisense strand.

[0251] For an RNAi agent having a duplex region of 17-23 nucleotide in length, the cleavage site of the antisense strand is typically around the 10, 11 and 12 positions from the 5′-end. Thus the motifs of three identical modifications may occur at the 9, 10, 11 positions; 10, 11, 12 positions; 11, 12, 13 positions; 12, 13, 14 positions; or 13, 14, 15 positions of the antisense strand, the count starting from the 1^{st} nucleotide from the 5′-end of the antisense strand, or, the count starting from the 1^{st} paired nucleotide within the duplex region from the 5′-end of the antisense strand. The cleavage site in the antisense strand may also change according to the length of the duplex region of the RNAi from the 5′-end.

[0252] The sense strand of the RNAi agent may contain at least one motif of three identical modifications on three consecutive nucleotides at the cleavage site of the strand; and the antisense strand may have at least one motif of three identical modifications on three consecutive nucleotides at or near the cleavage site of the strand. When the sense strand and the antisense strand form a dsRNA duplex, the sense strand and the antisense strand can be so aligned that one motif of the three nucleotides on the sense strand and one motif of the three nucleotides on the antisense strand have at least one nucleotide overlap, i.e., at least one of the three nucleotides of the motif in the sense strand forms a base pair with at least one of the three nucleotides of the motif in the antisense strand. Alternatively, at least two nucleotides may overlap, or all three nucleotides may overlap.

[0253] In one embodiment, the sense strand of the RNAi agent may contain more than one motif of three identical modifications on three consecutive nucleotides. The first motif may occur at or near the cleavage site of the strand and the other motifs may be a wing modification. The term “wing modification” herein refers to a motif occurring at another portion of the strand that is separated from the motif at or near the cleavage site of the same strand. The wing modification is either adajacent to the first motif or is separated by at least one or more nucleotides. When the motifs are immediately adjacent to each other then the chemistry of the motifs are distinct from each other and when the motifs are separated by one or more nucleotide than the chemistries can be the same or different. Two or more wing modifications may be present. For instance, when two wing modifications are present, each wing modification may occur at one end relative to the first motif which is at or near cleavage site or on either side of the lead motif.

[0254] Like the sense strand, the antisense strand of the RNAi agent may contain more than one motif of three identical modifications on three consecutive nucleotides, with at least one of the motifs occurring at or near the cleavage site of the strand. This antisense strand may also contain one or more wing modifications in an alignment similar to the wing modifications that may be present on the sense strand.

[0255] In one embodiment, the wing modification on the sense strand or antisense strand of the RNAi agent typically does not include the first one or two terminal nucleotides at the 3′-end, 5′-end or both ends of the strand.

[0256] In another embodiment, the wing modification on the sense strand or antisense strand of the RNAi agent typically does not include the first one or two paired nucleotides within the duplex region at the 3′-end, 5′-end or both ends of the strand.

[0257] When the sense strand and the antisense strand of the RNAi agent each contain at least one wing modification, the wing modifications may fall on the same end of the duplex region, and have an overlap of one, two or three nucleotides.

[0258] When the sense strand and the antisense strand of the RNAi agent each contain at least two wing modifications, the sense strand and the antisense strand can be so aligned that two modifications each from one strand fall on one end of the duplex region, having an overlap of one, two or three nucleotides; two modifications each from one strand fall on the other end of the duplex region, having an overlap of one, two or three nucleotides; two modifications one strand fall on each side of the lead motif, having an overlap of one, two, or three nucleotides in the duplex region.

[0259] In one embodiment, the RNAi agent comprises mismatch(es) with the target, within the duplex, or combinations thereof. The mistmatch may occur in the overhang region or the duplex region. The base pair may be ranked on the basis of their propensity to promote dissociation or melting (e.g., on the free energy of association or dissociation of a particular pairing, the simplest approach is to examine the pairs on an individual pair basis, though next neighbor or similar analysis can also be used). In terms of promoting dissociation: A:U is preferred over G:C; G:U is preferred over G:C; and I:C is preferred over G:C (I=inosine). Mismatches, e.g., non-canonical or other than canonical pairings (as described elsewhere herein) are preferred over canonical (A:T, A:U, G:C) pairings; and pairings which include a universal base are preferred over canonical pairings.

[0260] In one embodiment, the RNAi agent comprises at least one of the first 1, 2, 3, 4, or 5 base pairs within the duplex regions from the 5′-end of the antisense strand independently selected from the group of: A:U, G:U, I:C, and mismatched pairs, e.g., non-canonical or other than canonical pairings or pairings which include a universal base, to promote the dissociation of the antisense strand at the 5′-end of the duplex.

[0261] In one embodiment, the nucleotide at the 1 position within the duplex region from the 5′-end in the antisense strand is selected from the group consisting of A, dA, dU, U, and dT. Alternatively, at least one of the first 1, 2 or 3 base pair within the duplex region from the 5′-end of the antisense strand is an AU base pair. For example, the first base pair within the duplex region from the 5′-end of the antisense strand is an AU base pair.

[0262] In another embodiment, the nucleotide at the 3′-end of the sense strand is deoxy-thymine (dT). In another embodiment, the nucleotide at the 3′-end of the antisense strand is deoxy-thymine (dT). In one embodiment, there is a short sequence of deoxy-thymine nucleotides, for example, two dT nucleotides on the 3′-end of the sense or antisense strand.

[0263] In one embodiment, the sense strand sequence may be represented by formula (I):

5′ nₚ-Nₐ—(XXX)ᵢ—N_{b}—YYY—N_{b}—(ZZZ)ⱼ—Nₐ-n_{q} 3′ (I)
[0264] wherein:
[0265] i and j are each independently 0 or 1;
[0266] p and q are each independently 0-6;
[0267] each Nₐ independently represents an oligonucleotide sequence comprising 0-25 modified nucleotides, each sequence comprising at least two differently modified nucleotides;
[0268] each N_{b} independently represents an oligonucleotide sequence comprising 0-10 modified nucleotides;
[0269] each nₚ and n_{q} independently represent an overhang nucleotide;
[0270] wherein N_{b} and Y do not have the same modification; and
[0271] XXX, YYY and ZZZ each independently represent one motif of three identical modifications on three consecutive nucleotides. Preferably YYY is all 2′-F modified nucleotides.

[0272] In one embodiment, the Nₐ or N_{b} comprise modifications of alternating pattern.

[0273] In one embodiment, the YYY motif occurs at or near the cleavage site of the sense strand. For example, when the RNAi agent has a duplex region of 17-23 nucleotides in length, the YYY motif can occur at or the vicinity of the cleavage site (e.g.: can occur at positions 6, 7, 8, 7, 8, 9, 8, 9, 10, 9, 10, 11, 10, 11, 12 or 11, 12, 13) of—the sense strand, the count starting from the 1^{St} nucleotide, from the 5′-end; or optionally, the count starting at the 1⁴′ paired nucleotide within the duplex region, from the 5′-end.

[0274] In one embodiment, i is 1 and j is 0, or i is 0 and j is 1, or both i and j are 1. The sense strand can therefore be represented by the following formulas:

5′ nₚ-Nₐ—YYY—N_{b}—ZZZ—Nₐ-n_{q} 3′ (Ib);

5′ nₚ-Nₐ—XXX—N_{b}—YYY—Nₐ-n_{q} 3′ (Ic); or

5′ nₚ-Nₐ—XXX—N_{b}—YYY—N_{b}—ZZZ—Nₐ-n_{q} 3′ (Id).

[0275] When the sense strand is represented by formula (Ib), N_{b} represents an oligonucleotide sequence comprising 0-10, 0-7, 0-5, 0-4, 0-2 or 0 modified nucleotides.

[0276] Each Nₐ independently can represent an oligonucleotide sequence comprising 2-20, 2-15, or 2-10 modified nucleotides.

[0277] When the sense strand is represented as formula (Ic), N_{b} represents an oligonucleotide sequence comprising 0-10, 0-7, 0-10, 0-7, 0-5, 0-4, 0-2 or 0 modified nucleotides. Each Nₐ can independently represent an oligonucleotide sequence comprising 2-20, 2-15, or 2-10 modified nucleotides.

[0278] When the sense strand is represented as formula (Id), each N_{b} independently represents an oligonucleotide sequence comprising 0-10, 0-7, 0-5, 0-4, 0-2 or 0 modified nucleotides. Preferably, N_{b}is 0, 1, 2, 3, 4, 5 or 6. Each Nₐ can independently represent an oligonucleotide sequence comprising 2-20, 2-15, or 2-10 modified nucleotides.

[0279] Each of X, Y and Z may be the same or different from each other.

[0280] In other embodiments, i is 0 and j is 0, and the sense strand may be represented by the formula:

5′ nₚ-Nₐ—YYY—Nₐ-n_{q} 3′ (Ia).

[0281] When the sense strand is represented by formula (Ia), each Nₐ independently can represent an oligonucleotide sequence comprising 2-20, 2-15, or 2-10 modified nucleotides.

[0282] In one embodiment, the antisense strand sequence of the RNAi may be represented by formula (II):

5′ n_{q}′-Nₐ′—(Z′Z′Z′)ₖ—N_{b}′—Y′Y′Y′—N_{b}′—(X′X′X′)₁—N′ₐ-nₚ′ 3′ (II)
[0283] wherein:
[0284] k and l are each independently 0 or 1;
[0285] p′ and q′ are each independently 0-6;
[0286] each Nₐ′ independently represents an oligonucleotide sequence comprising 0-25 modified nucleotides, each sequence comprising at least two differently modified nucleotides;
[0287] each N_{b}′ independently represents an oligonucleotide sequence comprising 0-10 modified nucleotides;
[0288] each nₚ′ and n_{q}′ independently represent an overhang nucleotide;
[0289] wherein N_{b}′ and Y′ do not have the same modification;
[0290] and
[0291] X′X′X′, Y′Y′Y′ and Z′Z′Z′ each independently represent one motif of three identical modifications on three consecutive nucleotides.

[0292] In one embodiment, the Nₐ′ or N_{b}′ comprise modifications of alternating pattern.

[0293] The Y′Y′Y′ motif occurs at or near the cleavage site of the antisense strand. For example, when the RNAi agent has a duplex region of 17-23 nucleotide in length, the Y′Y′Y′ motif can occur at positions 9, 10, 11; 10, 11, 12; 11, 12, 13; 12, 13, 14; or 13, 14, 15 of the antisense strand, with the count starting from the 1^{St} nucleotide, from the 5′-end; or optionally, the count starting at the 1′ paired nucleotide within the duplex region, from the 5′-end. Preferably, the Y′Y′Y′ motif occurs at positions 11, 12, 13.

[0294] In one embodiment, Y′Y′Y′ motif is all 2′-OMe modified nucleotides.

[0295] In one embodiment, k is 1 and 1 is 0, or k is 0 and 1 is 1, or both k and l are 1.

[0296] The antisense strand can therefore be represented by the following formulas:

5′ n_{q}′-Nₐ′—Z′Z′Z′—N_{b}′—Y′Y′Y′—Nₐ′-nₚ, 3′ (IIb);

5′ n_{q}′-Nₐ′—Y′Y′Y′—N_{b}′—X′X′X′-nₚ, 3′ (IIc); or

5′ n_{q}′-Nₐ′—Z′Z′Z′—N_{b}′—Y′Y′Y′—N_{b}′—X′X′X′—Nₐ′-nₚ, 3′ (IId).

[0297] When the antisense strand is represented by formula (IIb), N_{b}′ represents an oligonucleotide sequence comprising 0-10, 0-7, 0-10, 0-7, 0-5, 0-4, 0-2 or 0 modified nucleotides. Each Nₐ′ independently represents an oligonucleotide sequence comprising 2-20, 2-15, or 2-10 modified nucleotides.

[0298] When the antisense strand is represented as formula (IIc), N_{b}′ represents an oligonucleotide sequence comprising 0-10, 0-7, 0-10, 0-7, 0-5, 0-4, 0-2 or 0 modified nucleotides. Each Nₐ′ independently represents an oligonucleotide sequence comprising 2-20, 2-15, or 2-10 modified nucleotides.

[0299] When the antisense strand is represented as formula (IId), each N_{b}′ independently represents an oligonucleotide sequence comprising 0-10, 0-7, 0-10, 0-7, 0-5, 0-4, 0-2 or 0 modified nucleotides. Each Nₐ′ independently represents an oligonucleotide sequence comprising 2-20, 2-15, or 2-10 modified nucleotides. Preferably, N_{b} is 0, 1, 2, 3, 4, 5 or 6.

[0300] In other embodiments, k is 0 and 1 is 0 and the antisense strand may be represented by the formula:

5′ np′—Na′—Y′Y′Y′—Na′-nq′ 3′ (Ia).

[0301] When the antisense strand is represented as formula (IIa), each Nₐ′ independently represents an oligonucleotide sequence comprising 2-20, 2-15, or 2-10 modified nucleotides.

[0302] Each of X′, Y′ and Z′ may be the same or different from each other.

[0303] Each nucleotide of the sense strand and antisense strand may be independently modified with LNA, HNA, CeNA, 2′-methoxyethyl, 2′-O-methyl, 2′-O-allyl, 2′-C-allyl, 2′-hydroxyl, or 2′-fluoro. For example, each nucleotide of the sense strand and antisense strand is independently modified with 2′-O-methyl or 2′-fluoro. Each X, Y, Z, X′, Y′ and Z′, in particular, may represent a 2′-O-methyl modification or a 2′-fluoro modification.

[0304] In one embodiment, the sense strand of the RNAi agent may contain YYY motif occurring at 9, 10 and 11 positions of the strand when the duplex region is 21 nt, the count starting from the 1^{st} nucleotide from the 5′-end, or optionally, the count starting at the 1^{st} paired nucleotide within the duplex region, from the 5′-end; and Y represents 2′-F modification. The sense strand may additionally contain XXX motif or ZZZ motifs as wing modifications at the opposite end of the duplex region; and XXX and ZZZ each independently represents a 2′-OMe modification or 2′-F modification.

[0305] In one embodiment the antisense strand may contain Y′Y′Y′ motif occurring at positions 11, 12, 13 of the strand, the count starting from the 1^{st} nucleotide from the 5′-end, or optionally, the count starting at the 151 paired nucleotide within the duplex region, from the 5′-end; and Y′ represents 2′-O-methyl modification. The antisense strand may additionally contain X′X′X′ motif or Z′Z′Z′ motifs as wing modifications at the opposite end of the duplex region; and X′X′X′ and Z′Z′Z′ each independently represents a 2′-OMe modification or 2′-F modification.

[0306] The sense strand represented by any one of the above formulas (Ia), (Ib), (Ic), and (Id) forms a duplex with a antisense strand being represented by any one of formulas (IIa), (IIb), (IIc), and (IId), respectively.

[0307] Accordingly, the RNAi agents for use in the methods of the disclosure may comprise a sense strand and an antisense strand, each strand having 14 to 30 nucleotides, the RNAi duplex represented by formula (III):

sense: 5′ nₚ-Nₐ—(XXX)ᵢ—N_{b}—YYY—N_{b}—(ZZZ)ⱼ—Nₐ-n_{q} 3′

antisense: 3′ nₚ′-Nₐ′—(X′X′X′)ₖ—N_{b}′—Y′Y′Y′—N_{b}′—(Z′Z′Z′)ₗ-Nₐ′-n_{q}′5′ (III)
[0308] wherein:
[0309] i, j, k, and 1 are each independently 0 or 1;
[0310] p, p′, q, and q′ are each independently 0-6;
[0311] each Nₐ and Nₐ′ independently represents an oligonucleotide sequence comprising 0-25 modified nucleotides, each sequence comprising at least two differently modified nucleotides;
[0312] each N_{b} and N_{b}′ independently represents an oligonucleotide sequence comprising 0-10 modified nucleotides;
[0313] wherein
[0314] each nₚ′, nₚ, n_{q}′, and n_{q}, each of which may or may not be present, independently represents an overhang nucleotide; and
[0315] XXX, YYY, ZZZ, X′X′X′, Y′Y′Y′, and Z′Z′Z′ each independently represent one motif of three identical modifications on three consecutive nucleotides.

[0316] In one embodiment, i is 0 and j is 0; or i is 1 and j is 0; or i is 0 and j is 1; or both i and j are 0; or both i and j are 1. In another embodiment, k is 0 and 1 is 0; or k is 1 and 1 is 0; k is 0 and 1 is 1; or both k and l are 0; or both k and l are 1.

[0317] Exemplary combinations of the sense strand and antisense strand forming an RNAi duplex include the formulas below:

5′ nₚ-Nₐ—YYY—Nₐ-n_{q} 3′

3′ nₚ′-Nₐ′—Y′Y′Y′—Nₐ′n_{q}′5′ (IIIa)

5′ nₚ-Nₐ—YYY—N_{b}—ZZZ—Nₐ-n_{q} 3′

3′ nₚ′-Nₐ′—Y′Y′Y′—N_{b}′—Z′Z′Z′—Nₐ′n_{q}′ 5′ (IIIb)

5′ nₚ-Nₐ—XXX—N_{b}—YYY—Nₐ-n_{q} 3′

3′ nₚ′-Nₐ′—X′X′X′—N_{b}′—Y′Y′Y′—Nₐ′-n_{q}′ 5′ (IIIc)

5′ nₚ-Nₐ—XXX—N_{b}—YYY—N_{b}—ZZZ—Nₐ-n_{q} 3′

3′ nₚ′-Nₐ′—X′X′X′—N_{b}′—Y′Y′Y′—N_{b}′—Z′Z′Z′—Nₐ-n_{q}′ 5′ (IIId)

[0318] When the RNAi agent is represented by formula (IIIa), each Nₐ independently represents an oligonucleotide sequence comprising 2-20, 2-15, or 2-10 modified nucleotides.

[0319] When the RNAi agent is represented by formula (IIIb), each N_{b} independently represents an oligonucleotide sequence comprising 1-10, 1-7, 1-5 or 1-4 modified nucleotides. Each Nₐ independently represents an oligonucleotide sequence comprising 2-20, 2-15, or 2-10 modified nucleotides.

[0320] When the RNAi agent is represented as formula (IIIc), each N_{b}, N_{b}′ independently represents an oligonucleotide sequence comprising 0-10, 0-7, 0-10, 0-7, 0-5, 0-4, 0-2 or 0 modified nucleotides. Each Nₐ independently represents an oligonucleotide sequence comprising 2-20, 2-15, or 2-10 modified nucleotides.

[0321] When the RNAi agent is represented as formula (IIId), each N_{b}, N_{b}′ independently represents an oligonucleotide sequence comprising 0-10, 0-7, 0-10, 0-7, 0-5, 0-4, 0-2 or 0 modified nucleotides. Each Nₐ, Nₐ′ independently represents an oligonucleotide sequence comprising 2-20, 2-15, or 2-10 modified nucleotides. Each of Nₐ, Nₐ′, N_{b} and N_{b}′ independently comprises modifications of alternating pattern.

[0322] In one embodiment, when the RNAi agent is represented by formula (IIId), the Nₐ modifications are 2′-O-methyl or 2′-fluoro modifications. In another embodiment, when the RNAi agent is represented by formula (IIId), the Nₐ modifications are 2′-O-methyl or 2′-fluoro modifications and nₚ′>0 and at least one nₚ′ is linked to a neighboring nucleotide a via phosphorothioate linkage. In yet another embodiment, when the RNAi agent is represented by formula (IIId), the Nₐ modifications are 2′-O-methyl or 2′-fluoro modifications, nₚ′>0 and at least one nₚ′ is linked to a neighboring nucleotide via phosphorothioate linkage, and the sense strand is conjugated to one or more C16 (or related) moieties attached through a bivalent or trivalent branched linker (described below). In another embodiment, when the RNAi agent is represented by formula (IIId), the Nₐ modifications are 2′-O-methyl or 2′-fluoro modifications, nₚ′>0 and at least one nₚ′ is linked to a neighboring nucleotide via phosphorothioate linkage, the sense strand comprises at least one phosphorothioate linkage, and the sense strand is conjugated to one or more lipophilic, e.g., C16 (or related) moieties, optionally attached through a bivalent or trivalent branched linker.

[0323] In one embodiment, when the RNAi agent is represented by formula (IIIa), the Nₐ modifications are 2′-O-methyl or 2′-fluoro modifications, nₚ′>0 and at least one nₚ′ is linked to a neighboring nucleotide via phosphorothioate linkage, the sense strand comprises at least one phosphorothioate linkage, and the sense strand is conjugated to one or more lipophilic, e.g., C16 (or related) moieties attached through a bivalent or trivalent branched linker.

[0324] In one embodiment, the RNAi agent is a multimer containing at least two duplexes represented by formula (III), (IIIa), (IIIb), (IIIc), and (IIId), wherein the duplexes are connected by a linker. The linker can be cleavable or non-cleavable. Optionally, the multimer further comprises a ligand. Each of the duplexes can target the same gene or two different genes; or each of the duplexes can target same gene at two different target sites.

[0325] In one embodiment, the RNAi agent is a multimer containing three, four, five, six or more duplexes represented by formula (III), (IIIa), (IIIb), (IIIc), and (IIId), wherein the duplexes are connected by a linker. The linker can be cleavable or non-cleavable. Optionally, the multimer further comprises a ligand. Each of the duplexes can target the same gene or two different genes; or each of the duplexes can target same gene at two different target sites.

[0326] In one embodiment, two RNAi agents represented by formula (III), (IIIa), (IIIb), (IIIc), and (IIId) are linked to each other at the 5′ end, and one or both of the 3′ ends and are optionally conjugated to to a ligand. Each of the agents can target the same gene or two different genes; or each of the agents can target same gene at two different target sites.

[0327] Various publications describe multimeric RNAi agents that can be used in the methods of the disclosure. Such publications include WO2007/091269, WO2010/141511, WO2007/117686, WO2009/014887, and WO2011/031520; and U.S. Pat. No. 7,858,769, the entire contents of each of which are hereby incorporated herein by reference.

[0328] In certain embodiments, the compositions and methods of the disclosure include a vinyl phosphonate (VP) modification of an RNAi agent as described herein. In exemplary embodiments, a 5′ vinyl phosphonate modified nucleotide of the disclosure has the structure:

[chemical structure]

wherein X is O or S;
[0329] R is hydrogen, hydroxy, fluoro, or C₁₋₂₀ alkoxy (e.g., methoxy or n-hexadecyloxy);
[0330] R^{5′} is ═C(H)—P(O)(OH)₂ and the double bond between the C5′ carbon and R^{5′} is in the E or Z orientation (e.g., E orientation); and
[0331] B is a nucleobase or a modified nucleobase, optionally where B is adenine, guanine, cytosine, thymine, or uracil.

[0332] In one embodiment, R^{5′} is ═C(H)—P(O)(OH)₂ and the double bond between the C5′ carbon and R^{5′} is in the E orientation. In another embodiment, R is methoxy and R^{5′} is ═C(H)—P(O)(OH)₂ and the double bond between the C5′ carbon and R^{5′} is in the E orientation. In another embodiment, X is S, R is methoxy, and R^{5′} is ═C(H)—P(O)(OH)₂ and the double bond between the C5′ carbon and R^{5′} is in the E orientation.

[0333] The 5′-end phosphorus-containing group also includes a 5′-phosphate prodrug or 5′-phosphonate prodrug.

[0334] A vinyl phosphonate of the instant disclosure may be attached to either the antisense or the sense strand of a dsRNA of the disclosure. In certain embodiments, a vinyl phosphonate of the instant disclosure is attached to the antisense strand of a dsRNA, optionally at the 5′ end of the antisense strand of the dsRNA.

[0335] Vinyl phosphate modifications are also contemplated for the compositions and methods of the instant disclosure. An exemplary vinyl phosphate structure includes the preceding structure, where R^{5′} is ═C(H)—OP(O)(OH)2 and the double bond between the C5′ carbon and R^{5′} is in the E or Z orientation (e.g., E orientation).

[0336] In other examples, the 5′-end phosphorus-containing group is

[chemical structure]

or a salt (e.g., sodium salt) thereof, wherein B is an optionally modified nucleobase (e.g., U). In other examples, the 5′-phosphate prodrug or 5′-phosphonate prodrug has a structure disclosed in WO2022/147214, which is incorporated herein by reference.
[0337] Pmmds

[chemical structure]

((4SR,5SR)-3,3,5-trimethyl-1,2-dithiolan-4-ol) phosphodiester);
[0338] cPmmds

[chemical structure]

((4SR,5RS)-3,3,5-trimethyl-1,2-dithiolan-4-ol) phosphodiester (Cis Pmmds));
[0339] PdAr1s

[chemical structure]

((4SR,5RS)-5-phenyl-3,3-dimethyl-1,2-dithiolan-4-ol) phosphodiester);
[0340] PdAr3s

[chemical structure]

((4SR,5RS)-5-(4-methylphenyl)-3,3-dimethyl-1,2-dithiolan-4-ol) phosphodiester);
[0341] Pdr5 s

[chemical structure]

((4SR,5RS)-5-(4-methoxyphenyl)-3,3-dimethyl-1,2-dithiolan-4-ol) phosphodiester);

[chemical structure]

[chemical structure]

[0342] For instance, the activity of the siRNAs containing the following list of 5′ modified phosphate prodrugs,

[chemical structure]

were generally comparable to the activity of siRNAs containing 5′-VP. The siRNAs containing the following list of 5′ modified phosphate prodrugs,

[chemical structure]

generally have an improved stability than that of siRNAs containing 5′-VP and have a better or comparable activity than that of siRNAs containing 5′-VP.
i. Thermally Destabilizing Modifications

[0343] In certain embodiments, a dsRNA molecule can be optimized for RNA interference by incorporating thermally destabilizing modifications in the seed region of the antisense strand (i.e., at positions 2-9 of the 5′-end of the antisense strand or at positions 2-8 of the 5′-end of the antisense strand) to reduce or inhibit off-target gene silencing. It has been discovered that dsRNAs with an antisense strand comprising at least one thermally destabilizing modification of the duplex within the first 9 nucleotide positions, counting from the 5′ end, of the antisense strand have reduced off-target gene silencing activity. Accordingly, in some embodiments, the antisense strand comprises at least one (e.g., one, two, three, four, five or more) thermally destabilizing modification of the duplex within the first 9 nucleotide positions of the 5′ region of the antisense strand. In some embodiments, one or more thermally destabilizing modification(s) of the duplex is/are located in positions 2-9, or preferably positions 4-8, from the 5′-end of the antisense strand. In some further embodiments, the thermally destabilizing modification(s) of the duplex is/are located at position 6, 7 or 8 from the 5′-end of the antisense strand. In still some further embodiments, the thermally destabilizing modification of the duplex is located at position 7 from the 5′-end of the antisense strand. The term “thermally destabilizing modification(s)” includes modification(s) that would result with a dsRNA with a lower overall melting temperature (Tm) (preferably a Tm with one, two, three or four degrees lower than the Tm of the dsRNA without having such modification(s). In some embodiments, the thermally destabilizing modification of the duplex is located at position 2, 3, 4, 5 or 9 from the 5′-end of the antisense strand.

[0344] The thermally destabilizing modifications can include, but are not limited to, abasic modification; mismatch with the opposing nucleotide in the opposing strand; and sugar modification such as 2′-deoxy modification or acyclic nucleotide, e.g., unlocked nucleic acids (UNA), glycol nucleic acid (GNA) and 2′-5′-linked ribonucleotides (“3′-RNA”).

[0345] Exemplified abasic modifications include, but are not limited to the following:

[chemical structure]

[0346] Wherein R═H, Me, Et or OMe; R′═H, Me, Et or OMe; R″═H, Me, Et or OMe

[chemical structure]

wherein B is a modified or unmodified nucleobase.

[0347] Exemplified sugar modifications include, but are not limited to the following:

[chemical structure]

wherein B is a modified or unmodified nucleobase.

[0348] In some embodiments the thermally destabilizing modification of the duplex is selected from the group consisting of:

[chemical structure]

wherein B is a modified or unmodified nucleobase and the asterisk on each structure represents either R, S or racemic.

[0349] In some embodiments the thermally destabilizing modification of the duplex is selected from the group consisting of:

[chemical structure]

wherein B is a modified or unmodified nucleobase and the asterisk represents either R, S or racemic (e.g. S).

[0350] The term “acyclic nucleotide” refers to any nucleotide having an acyclic ribose sugar, for example, where any of bonds between the ribose carbons (e.g., C1′-C2′, C2′-C3′, C3′-C4′, C4′-C4′, or C1′-C4′) is absent or at least one of ribose carbons or oxygen (e.g., C1′, C2′, C3′, C4′ or C4′) are independently or in combination absent from the nucleotide. In some embodiments, acyclic nucleotide is

[chemical structure]

wherein B is a modified or unmodified nucleobase, R¹ and R² independently are H, halogen, OR₃, or alkyl; and R₃ is H, alkyl, cycloalkyl, aryl, aralkyl, heteroaryl or sugar). The term “UNA” refers to unlocked acyclic nucleic acid, wherein any of the bonds of the sugar has been removed, forming an unlocked “sugar” residue. In one example, UNA also encompasses monomers with bonds between C1′-C4′ being removed (i.e. the covalent carbon-oxygen-carbon bond between the C1′ and C4′ carbons). In another example, the C2′-C3′ bond (i.e. the covalent carbon-carbon bond between the C2′ and C3′ carbons) of the sugar is removed (see Mikhailov et. al., Tetrahedron Letters, 26 (17): 2059 (1985); and Fluiter et al., Mol. Biosyst., 10: 1039 (2009), which are hereby incorporated by reference in their entirety). The acyclic derivative provides greater backbone flexibility without affecting the Watson-Crick pairings. The acyclic nucleotide can be linked via 2′-5′ or 3′-5′ linkage.

[0351] The term ‘GNA’ refers to glycol nucleic acid which is a polymer similar to DNA or RNA but differing in the composition of its “backbone” in that is composed of repeating glycerol units linked by phosphodiester bonds:

[chemical structure]

[0352] The thermally destabilizing modification of the duplex can be mismatches (i.e., noncomplementary base pairs) between the thermally destabilizing nucleotide and the opposing nucleotide in the opposite strand within the dsRNA duplex. Exemplary mismatch base pairs include G:G, G:A, G:U, G:T, A:A, A:C, C:C, C:U, C:T, U:U, T:T, U:T, or a combination thereof. Other mismatch base pairings known in the art are also amenable to the present invention. A mismatch can occur between nucleotides that are either naturally occurring nucleotides or modified nucleotides, i.e., the mismatch base pairing can occur between the nucleobases from respective nucleotides independent of the modifications on the ribose sugars of the nucleotides. In certain embodiments, the dsRNA molecule contains at least one nucleobase in the mismatch pairing that is a 2′-deoxy nucleobase; e.g., the 2′-deoxy nucleobase is in the sense strand.

[0353] In some embodiments, the thermally destabilizing modification of the duplex in the seed region of the antisense strand includes nucleotides with impaired W—C H-bonding to complementary base on the target mRNA, such as:

[chemical structure]

[0354] More examples of abasic nucleotide, acyclic nucleotide modifications (including UNA and GNA), and mismatch modifications have been described in detail in WO 2011/133876, which is herein incorporated by reference in its entirety.

[0355] The thermally destabilizing modifications may also include universal base with reduced or abolished capability to form hydrogen bonds with the opposing bases, and phosphate modifications.

[0356] In some embodiments, the thermally destabilizing modification of the duplex includes nucleotides with non-canonical bases such as, but not limited to, nucleobase modifications with impaired or completely abolished capability to form hydrogen bonds with bases in the opposite strand. These nucleobase modifications have been evaluated for destabilization of the central region of the dsRNA duplex as described in WO 2010/0011895, which is herein incorporated by reference in its entirety. Exemplary nucleobase modifications are:

[chemical structure]

[0357] In some embodiments, the thermally destabilizing modification of the duplex in the seed region of the antisense strand includes one or more α-nucleotide complementary to the base on the target mRNA, such as:

[chemical structure]

wherein R is H, OH, OCH₃, F, NH₂, NHMe, NMe₂ or O-alkyl.

[0358] Exemplary phosphate modifications known to decrease the thermal stability of dsRNA duplexes compared to natural phosphodiester linkages are:

[chemical structure]

[0359] The alkyl for the R group can be a C₁-C₆alkyl. Specific alkyls for the R group include, but are not limited to methyl, ethyl, propyl, isopropyl, butyl, pentyl and hexyl. As the skilled artisan will recognize, in view of the functional role of nucleobases is defining specificity of an RNAi agent of the disclosure, while nucleobase modifications can be performed in the various manners as described herein, e.g., to introduce destabilizing modifications into an RNAi agent of the disclosure, e.g., for purpose of enhancing on-target effect relative to off-target effect, the range of modifications available and, in general, present upon RNAi agents of the disclosure tends to be much greater for non-nucleobase modifications, e.g., modifications to sugar groups or phosphate backbones of polyribonucleotides. Such modifications are described in greater detail in other sections of the instant disclosure and are expressly contemplated for RNAi agents of the disclosure, either possessing native nucleobases or modified nucleobases as described above or elsewhere herein.

[0360] In addition to the antisense strand comprising a thermally destabilizing modification, the dsRNA can also comprise one or more stabilizing modifications. For example, the dsRNA can comprise at least two (e.g., two, three, four, five, six, seven, eight, nine, ten or more) stabilizing modifications. Without limitations, the stabilizing modifications all can be present in one strand. In some embodiments, both the sense and the antisense strands comprise at least two stabilizing modifications. The stabilizing modification can occur on any nucleotide of the sense strand or antisense strand. For instance, the stabilizing modification can occur on every nucleotide on the sense strand or antisense strand; each stabilizing modification can occur in an alternating pattern on the sense strand or antisense strand; or the sense strand or antisense strand comprises both stabilizing modification in an alternating pattern. The alternating pattern of the stabilizing modifications on the sense strand may be the same or different from the antisense strand, and the alternating pattern of the stabilizing modifications on the sense strand can have a shift relative to the alternating pattern of the stabilizing modifications on the antisense strand.

[0361] In some embodiments, the antisense strand comprises at least two (e.g., two, three, four, five, six, seven, eight, nine, ten or more) stabilizing modifications. Without limitations, a stabilizing modification in the antisense strand can be present at any positions. In some embodiments, the antisense comprises stabilizing modifications at positions 2, 6, 8, 9, 14, and 16 from the 5′-end. In some other embodiments, the antisense comprises stabilizing modifications at positions 2, 6, 14, and 16 from the 5′-end. In still some other embodiments, the antisense comprises stabilizing modifications at positions 2, 14, and 16 from the 5′-end.

[0362] In some embodiments, the antisense strand comprises at least one stabilizing modification adjacent to the destabilizing modification. For example, the stabilizing modification can be the nucleotide at the 5′-end or the 3′-end of the destabilizing modification, i.e., at position −1 or +1 from the position of the destabilizing modification. In some embodiments, the antisense strand comprises a stabilizing modification at each of the 5′-end and the 3′-end of the destabilizing modification, i.e., positions −1 and +1 from the position of the destabilizing modification.

[0363] In some embodiments, the antisense strand comprises at least two stabilizing modifications at the 3′-end of the destabilizing modification, i.e., at positions +1 and +2 from the position of the destabilizing modification.

[0364] In some embodiments, the sense strand comprises at least two (e.g., two, three, four, five, six, seven, eight, nine, ten or more) stabilizing modifications. Without limitations, a stabilizing modification in the sense strand can be present at any positions. In some embodiments, the sense strand comprises stabilizing modifications at positions 7, 10, and 11 from the 5′-end. In some other embodiments, the sense strand comprises stabilizing modifications at positions 7, 9, 10, and 11 from the 5′-end. In some embodiments, the sense strand comprises stabilizing modifications at positions opposite or complimentary to positions 11, 12, and 15 of the antisense strand, counting from the 5′-end of the antisense strand. In some other embodiments, the sense strand comprises stabilizing modifications at positions opposite or complimentary to positions 11, 12, 13, and 15 of the antisense strand, counting from the 5′-end of the antisense strand. In some embodiments, the sense strand comprises a block of two, three, or four stabilizing modifications.

[0365] In some embodiments, the sense strand does not comprise a stabilizing modification in position opposite or complimentary to the thermally destabilizing modification of the duplex in the antisense strand.

[0366] Exemplary thermally stabilizing modifications include, but are not limited to, 2′-fluoro modifications. Other thermally stabilizing modifications include, but are not limited to, LNA.

[0367] In some embodiments, the dsRNA of the disclosure comprises at least four (e.g., four, five, six, seven, eight, nine, ten, or more) 2′-fluoro nucleotides. Without limitations, the 2′-fluoro nucleotides all can be present in one strand. In some embodiments, both the sense and the antisense strands comprise at least two 2′-fluoro nucleotides. The 2′-fluoro modification can occur on any nucleotide of the sense strand or antisense strand. For instance, the 2′-fluoro modification can occur on every nucleotide on the sense strand or antisense strand; each 2′-fluoro modification can occur in an alternating pattern on the sense strand or antisense strand; or the sense strand or antisense strand comprises both 2′-fluoro modifications in an alternating pattern. The alternating pattern of the 2′-fluoro modifications on the sense strand may be the same or different from the antisense strand, and the alternating pattern of the 2′-fluoro modifications on the sense strand can have a shift relative to the alternating pattern of the 2′-fluoro modifications on the antisense strand.

[0368] In some embodiments, the antisense strand comprises at least two (e.g., two, three, four, five, six, seven, eight, nine, ten, or more) 2′-fluoro nucleotides. Without limitations, a 2′-fluoro modification in the antisense strand can be present at any positions. In some embodiments, the antisense comprises 2′-fluoro nucleotides at positions 2, 6, 8, 9, 14, and 16 from the 5′-end. In some other embodiments, the antisense comprises 2′-fluoro nucleotides at positions 2, 6, 14, and 16 from the 5′-end. In still some other embodiments, the antisense comprises 2′-fluoro nucleotides at positions 2, 14, and 16 from the 5′-end.

[0369] In some embodiments, the antisense strand comprises at least one 2′-fluoro nucleotide adjacent to the destabilizing modification. For example, the 2′-fluoro nucleotide can be the nucleotide at the 5′-end or the 3′-end of the destabilizing modification, i.e., at position −1 or +1 from the position of the destabilizing modification. In some embodiments, the antisense strand comprises a 2′-fluoro nucleotide at each of the 5′-end and the 3′-end of the destabilizing modification, i.e., positions −1 and +1 from the position of the destabilizing modification.

[0370] In some embodiments, the antisense strand comprises at least two 2′-fluoro nucleotides at the 3′-end of the destabilizing modification, i.e., at positions +1 and +2 from the position of the destabilizing modification.

[0371] In some embodiments, the sense strand comprises at least two (e.g., two, three, four, five, six, seven, eight, nine, ten or more) 2′-fluoro nucleotides. Without limitations, a 2′-fluoro modification in the sense strand can be present at any positions. In some embodiments, the antisense comprises 2′-fluoro nucleotides at positions 7, 10, and 11 from the 5′-end. In some other embodiments, the sense strand comprises 2′-fluoro nucleotides at positions 7, 9, 10, and 11 from the 5′-end. In some embodiments, the sense strand comprises 2′-fluoro nucleotides at positions opposite or complimentary to positions 11, 12, and 15 of the antisense strand, counting from the 5′-end of the antisense strand. In some other embodiments, the sense strand comprises 2′-fluoro nucleotides at positions opposite or complimentary to positions 11, 12, 13, and 15 of the antisense strand, counting from the 5′-end of the antisense strand. In some embodiments, the sense strand comprises a block of two, three or four 2′-fluoro nucleotides.

[0372] In some embodiments, the sense strand does not comprise a 2′-fluoro nucleotide in position opposite or complimentary to the thermally destabilizing modification of the duplex in the antisense strand.

[0373] In some embodiments, the dsRNA molecule of the disclosure comprises a 21 nucleotides (nt) sense strand and a 23 nucleotides (nt) antisense, wherein the antisense strand contains at least one thermally destabilizing nucleotide, where the at least one thermally destabilizing nucleotide occurs in the seed region of the antisense strand (i.e., at position 2-9 of the 5′-end of the antisense strand or at positions 2-8 of the 5′-end of the antisense strand), wherein one end of the dsRNA is blunt, while the other end is comprises a 2 nt overhang, and wherein the dsRNA optionally further has at least one (e.g., one, two, three, four, five, six or all seven) of the following characteristics: (i) the antisense comprises 2, 3, 4, 5 or 6 2′-fluoro modifications; (ii) the antisense comprises 1, 2, 3, 4 or 5 phosphorothioate internucleotide linkages; (iii) the sense strand is conjugated with a ligand; (iv) the sense strand comprises 2, 3, 4 or 5 2′-fluoro modifications; (v) the sense strand comprises 1, 2, 3, 4 or 5 phosphorothioate internucleotide linkages; (vi) the dsRNA comprises at least four 2′-fluoro modifications; and (vii) the dsRNA comprises a blunt end at 5′-end of the antisense strand. Preferably, the 2 nt overhang is at the 3′-end of the antisense.

[0374] In some embodiments, the dsRNA molecule of the disclosure comprise a sense and antisense strands, wherein: the sense strand is 25-30 nucleotide residues in length, wherein starting from the 5′ terminal nucleotide (position 1), positions 1 to 23 of said sense strand comprise at least 8 ribonucleotides; antisense strand is 36-66 nucleotide residues in length and, starting from the 3′ terminal nucleotide, at least 8 ribonucleotides in the positions paired with positions 1-23 of sense strand to form a duplex; wherein at least the 3′ terminal nucleotide of antisense strand is unpaired with sense strand, and up to 6 consecutive 3′ terminal nucleotides are unpaired with sense strand, thereby forming a 3′ single stranded overhang of 1-6 nucleotides; wherein the 5′ terminus of antisense strand comprises from 10-30 consecutive nucleotides which are unpaired with sense strand, thereby forming a 10-30 nucleotide single stranded 5′ overhang; wherein at least the sense strand 5′ terminal and 3′ terminal nucleotides are base paired with nucleotides of antisense strand when sense and antisense strands are aligned for maximum complementarity, thereby forming a substantially duplexed region between sense and antisense strands; and antisense strand is sufficiently complementary to a target RNA along at least 19 ribonucleotides of antisense strand length to reduce target gene expression when said double stranded nucleic acid is introduced into a mammalian cell; and wherein the antisense strand contains at least one thermally destabilizing nucleotide, where at least one thermally destabilizing nucleotide is in the seed region of the antisense strand (i.e. at position 2-9 of the 5′-end of the antisense strand or at positions 2-8 of the 5′-end of the antisense strand). For example, the thermally destabilizing nucleotide occurs between positions opposite or complimentary to positions 14-17 of the 5′-end of the sense strand, and wherein the dsRNA optionally further has at least one (e.g., one, two, three, four, five, six or all seven) of the following characteristics: (i) the antisense comprises 2, 3, 4, 5, or 6 2′-fluoro modifications; (ii) the antisense comprises 1, 2, 3, 4, or 5 phosphorothioate internucleotide linkages; (iii) the sense strand is conjugated with a ligand; (iv) the sense strand comprises 2, 3, 4, or 5 2′-fluoro modifications; (v) the sense strand comprises 1, 2, 3, 4, or 5 phosphorothioate internucleotide linkages; and (vi) the dsRNA comprises at least four 2′-fluoro modifications; and (vii) the dsRNA comprises a duplex region of 12-30 nucleotide pairs in length.

[0375] In some embodiments, the dsRNA molecule of the disclosure comprises a sense and antisense strands, wherein said dsRNA molecule comprises a sense strand having a length which is at least 25 and at most 29 nucleotides and an antisense strand having a length which is at most 30 nucleotides with the sense strand comprises a modified nucleotide that is susceptible to enzymatic degradation at position 11 from the 5′end, wherein the 3′ end of said sense strand and the 5′ end of said antisense strand form a blunt end and said antisense strand is 1-4 nucleotides longer at its 3′ end than the sense strand, wherein the duplex region which is at least 25 nucleotides in length, and said antisense strand is sufficiently complementary to a target mRNA along at least 19 nt of said antisense strand length to reduce target gene expression when said dsRNA molecule is introduced into a mammalian cell, and wherein dicer cleavage of said dsRNA preferentially results in an siRNA comprising said 3′ end of said antisense strand, thereby reducing expression of the target gene in the mammal, wherein the antisense strand contains at least one thermally destabilizing nucleotide, where the at least one thermally destabilizing nucleotide is in the seed region of the antisense strand (i.e. at position 2-9 of the 5′-end of the antisense strand or at positions 2-8 of the 5′-end of the antisense strand), and wherein the dsRNA optionally further has at least one (e.g., one, two, three, four, five, six or all seven) of the following characteristics: (i) the antisense comprises 2, 3, 4, 5, or 6 2′-fluoro modifications; (ii) the antisense comprises 1, 2, 3, 4, or 5 phosphorothioate internucleotide linkages; (iii) the sense strand is conjugated with a ligand; (iv) the sense strand comprises 2, 3, 4, or 5 2′-fluoro modifications; (v) the sense strand comprises 1, 2, 3, 4, or 5 phosphorothioate internucleotide linkages; and (vi) the dsRNA comprises at least four 2′-fluoro modifications; and (vii) the dsRNA has a duplex region of 12-29 nucleotide pairs in length.

[0376] In some embodiments, every nucleotide in the sense strand and antisense strand of the dsRNA molecule may be modified. Each nucleotide may be modified with the same or different modification which can include one or more alteration of one or both of the non-linking phosphate oxygens or of one or more of the linking phosphate oxygens; alteration of a constituent of the ribose sugar, e.g., of the 2′ hydroxyl on the ribose sugar; wholesale replacement of the phosphate moiety with “dephospho” linkers; modification or replacement of a naturally occurring base; and replacement or modification of the ribose-phosphate backbone.

[0377] As nucleic acids are polymers of subunits, many of the modifications occur at a position which is repeated within a nucleic acid, e.g., a modification of a base, or a phosphate moiety, or a non-linking O of a phosphate moiety. In some cases, the modification will occur at all of the subject positions in the nucleic acid but in many cases it will not. By way of example, a modification may only occur at a 3′ or 5′ terminal position, may only occur in a terminal region, e.g., at a position on a terminal nucleotide or in the last 2, 3, 4, 5, or 10 nucleotides of a strand. A modification may occur in a double strand region, a single strand region, or in both. A modification may occur only in the double strand region of an RNA or may only occur in a single strand region of an RNA. E.g., a phosphorothioate modification at a non-linking O position may only occur at one or both termini, may only occur in a terminal region, e.g., at a position on a terminal nucleotide or in the last 2, 3, 4, 5, or 10 nucleotides of a strand, or may occur in double strand and single strand regions, particularly at termini. The 5′ end or ends can be phosphorylated.

[0378] It may be possible, e.g., to enhance stability, to include particular bases in overhangs, or to include modified nucleotides or nucleotide surrogates, in single strand overhangs, e.g., in a 5′ or 3′ overhang, or in both. E.g., it can be desirable to include purine nucleotides in overhangs. In some embodiments all or some of the bases in a 3′ or 5′ overhang may be modified, e.g., with a modification described herein. Modifications can include, e.g., the use of modifications at the 2′ position of the ribose sugar with modifications that are known in the art, e.g., the use of deoxyribonucleotides, 2′-deoxy-2′-fluoro (2′-F) or 2′-O-methyl modified instead of the ribosugar of the nucleobase, and modifications in the phosphate group, e.g., phosphorothioate modifications. Overhangs need not be homologous with the target sequence.

[0379] In some embodiments, each residue of the sense strand and antisense strand is independently modified with LNA, HNA, CeNA, 2′-methoxyethyl, 2′-O-methyl, 2′-O-allyl, 2′-C-allyl, 2′-deoxy, or 2′-fluoro. The strands can contain more than one modification. In some embodiments, each residue of the sense strand and antisense strand is independently modified with 2′-O-methyl or 2′-fluoro. It is to be understood that these modifications are in addition to the at least one thermally destabilizing modification of the duplex present in the antisense strand.

[0380] At least two different modifications are typically present on the sense strand and antisense strand. Those two modifications may be the 2′-deoxy, 2′-O-methyl or 2′-fluoro modifications, acyclic nucleotides or others. In some embodiments, the sense strand and antisense strand each comprises two differently modified nucleotides selected from 2′-O-methyl or 2′-deoxy. In some embodiments, each residue of the sense strand and antisense strand is independently modified with 2′-O-methyl nucleotide, 2′-deoxy nucleotide, 2′-deoxy-2′-fluoro nucleotide, 2′-O—N-methylacetamido (2′-O-NMA) nucleotide, a 2′-O-dimethylaminoethoxyethyl (2′-O-DMAEOE) nucleotide, 2′-O-aminopropyl (2′-O-AP) nucleotide, or 2′-ara-F nucleotide. Again, it is to be understood that these modifications are in addition to the at least one thermally destabilizing modification of the duplex present in the antisense strand.

[0381] In some embodiments, the dsRNA molecule of the disclosure comprises modifications of an alternating pattern, particular in the B1, B2, B3, B1′, B2′, B3′, B4′ regions. The term “alternating motif” or “alternative pattern” as used herein refers to a motif having one or more modifications, each modification occurring on alternating nucleotides of one strand. The alternating nucleotide may refer to one per every other nucleotide or one per every three nucleotides, or a similar pattern. For example, if A, B and C each represent one type of modification to the nucleotide, the alternating motif can be “ABABABABABAB . . . ,” “AABBAABBAABB . . . ,” “AABAABAABAAB . . . ,” “AAABAAABAAAB . . . ,” “AAABBBAAABBB . . . ,” or “ABCABCABCABC . . . ,” etc.

[0382] The type of modifications contained in the alternating motif may be the same or different. For example, if A, B, C, D each represent one type of modification on the nucleotide, the alternating pattern, i.e., modifications on every other nucleotide, may be the same, but each of the sense strand or antisense strand can be selected from several possibilities of modifications within the alternating motif such as “ABABAB . . . ”, “ACACAC . . . ” “BDBDBD . . . ” or “CDCDCD . . . ,” etc.

[0383] In some embodiments, the dsRNA molecule of the disclosure comprises the modification pattern for the alternating motif on the sense strand relative to the modification pattern for the alternating motif on the antisense strand is shifted. The shift may be such that the modified group of nucleotides of the sense strand corresponds to a differently modified group of nucleotides of the antisense strand and vice versa. For example, the sense strand when paired with the antisense strand in the dsRNA duplex, the alternating motif in the sense strand may start with “ABABAB” from 5′-3′ of the strand and the alternating motif in the antisense strand may start with “BABABA” from 3′-5′ of the strand within the duplex region. As another example, the alternating motif in the sense strand may start with “AABBAABB” from 5′-3′ of the strand and the alternating motif in the antisense strand may start with “BBAABBAA” from 3′-5′ of the strand within the duplex region, so that there is a complete or partial shift of the modification patterns between the sense strand and the antisense strand.

[0384] In one particular example, the alternating motif in the sense strand is “ABABAB” sfrom 5′-3′ of the strand, where each A is an unmodified ribonucleotide and each B is a 2′-Omethyl modified nucleotide.

[0385] In one particular example, the alternating motif in the sense strand is “ABABAB” sfrom 5′-3′ of the strand, where each A is an 2′-deoxy-2′-fluoro modified nucleotide and each B is a 2′-Omethyl modified nucleotide.

[0386] In another particular example, the alternating motif in the antisense strand is “BABABA” from 3′-5′ of the strand, where each A is a 2′-deoxy-2′-fluoro modified nucleotide and each B is a 2′-Omethyl modified nucleotide.

[0387] In one particular example, the alternating motif in the sense strand is “ABABAB” sfrom 5′-3′ of the strand and the alternating motif in the antisense strand is “BABABA” from 3′-5′ of the strand, where each A is an unmodified ribonucleotide and each B is a 2′-Omethyl modified nucleotide.

[0388] In one particular example, the alternating motif in the sense strand is “ABABAB” sfrom 5′-3′ of the strand and the alternating motif in the antisense strand is “BABABA” from 3′-5′ of the strand, where each A is a 2′-deoxy-2′-fluoro modified nucleotide and each B is a 2′-Omethyl modified nucleotide.

[0389] The dsRNA molecule of the disclosure may further comprise at least one phosphorothioate or methylphosphonate internucleotide linkage. The phosphorothioate or methylphosphonate internucleotide linkage modification may occur on any nucleotide of the sense strand or antisense strand or both in any position of the strand. For instance, the internucleotide linkage modification may occur on every nucleotide on the sense strand or antisense strand; each internucleotide linkage modification may occur in an alternating pattern on the sense strand or antisense strand; or the sense strand or antisense strand comprises both internucleotide linkage modifications in an alternating pattern. The alternating pattern of the internucleotide linkage modification on the sense strand may be the same or different from the antisense strand, and the alternating pattern of the internucleotide linkage modification on the sense strand may have a shift relative to the alternating pattern of the internucleotide linkage modification on the antisense strand.

[0390] In some embodiments, the dsRNA molecule comprises the phosphorothioate or methylphosphonate internucleotide linkage modification in the overhang region. For example, the overhang region comprises two nucleotides having a phosphorothioate or methylphosphonate internucleotide linkage between the two nucleotides. Internucleotide linkage modifications also may be made to link the overhang nucleotides with the terminal paired nucleotides within duplex region. For example, at least 2, 3, 4, or all the overhang nucleotides may be linked through phosphorothioate or methylphosphonate internucleotide linkage, and optionally, there may be additional phosphorothioate or methylphosphonate internucleotide linkages linking the overhang nucleotide with a paired nucleotide that is next to the overhang nucleotide. For instance, there may be at least two phosphorothioate internucleotide linkages between the terminal three nucleotides, in which two of the three nucleotides are overhang nucleotides, and the third is a paired nucleotide next to the overhang nucleotide. Preferably, these terminal three nucleotides may be at the 3′-end of the antisense strand.

[0391] In some embodiments, the sense strand of the dsRNA molecule comprises 1-10 blocks of two to ten phosphorothioate or methylphosphonate internucleotide linkages separated by 1, 2, 3, 4, 5, 6, 7, 8, 9, 10, 11, 12, 13, 14, 15, or 16 phosphate internucleotide linkages, wherein one of the phosphorothioate or methylphosphonate internucleotide linkages is placed at any position in the oligonucleotide sequence and the said sense strand is paired with an antisense strand comprising any combination of phosphorothioate, methylphosphonate and phosphate internucleotide linkages or an antisense strand comprising either phosphorothioate or methylphosphonate or phosphate linkage.

[0392] In some embodiments, the antisense strand of the dsRNA molecule comprises two blocks of two phosphorothioate or methylphosphonate internucleotide linkages separated by 1, 2, 3, 4, 5, 6, 7, 8, 9, 10, 11, 12, 13, 14, 15, 16, 17, or 18 phosphate internucleotide linkages, wherein one of the phosphorothioate or methylphosphonate internucleotide linkages is placed at any position in the oligonucleotide sequence and the said antisense strand is paired with a sense strand comprising any combination of phosphorothioate, methylphosphonate and phosphate internucleotide linkages or an antisense strand comprising either phosphorothioate or methylphosphonate or phosphate linkage.

[0393] In some embodiments, the antisense strand of the dsRNA molecule comprises two blocks of three phosphorothioate or methylphosphonate internucleotide linkages separated by 1, 2, 3, 4, 5, 6, 7, 8, 9, 10, 11, 12, 13, 14, 15, or 16 phosphate internucleotide linkages, wherein one of the phosphorothioate or methylphosphonate internucleotide linkages is placed at any position in the oligonucleotide sequence and the said antisense strand is paired with a sense strand comprising any combination of phosphorothioate, methylphosphonate and phosphate internucleotide linkages or an antisense strand comprising either phosphorothioate or methylphosphonate or phosphate linkage.

[0394] In some embodiments, the antisense strand of the dsRNA molecule comprises two blocks of four phosphorothioate or methylphosphonate internucleotide linkages separated by 1, 2, 3, 4, 5, 6, 7, 8, 9, 10, 11, 12, 13, or 14 phosphate internucleotide linkages, wherein one of the phosphorothioate or methylphosphonate internucleotide linkages is placed at any position in the oligonucleotide sequence and the said antisense strand is paired with a sense strand comprising any combination of phosphorothioate, methylphosphonate and phosphate internucleotide linkages or an antisense strand comprising either phosphorothioate or methylphosphonate or phosphate linkage.

[0395] In some embodiments, the antisense strand of the dsRNA molecule comprises two blocks of five phosphorothioate or methylphosphonate internucleotide linkages separated by 1, 2, 3, 4, 5, 6, 7, 8, 9, 10, 11, or 12 phosphate internucleotide linkages, wherein one of the phosphorothioate or methylphosphonate internucleotide linkages is placed at any position in the oligonucleotide sequence and the said antisense strand is paired with a sense strand comprising any combination of phosphorothioate, methylphosphonate and phosphate internucleotide linkages or an antisense strand comprising either phosphorothioate or methylphosphonate or phosphate linkage.

[0396] In some embodiments, the antisense strand of the dsRNA molecule comprises two blocks of six phosphorothioate or methylphosphonate internucleotide linkages separated by 1, 2, 3, 4, 5, 6, 7, 8, 9, or 10 phosphate internucleotide linkages, wherein one of the phosphorothioate or methylphosphonate internucleotide linkages is placed at any position in the oligonucleotide sequence and the said antisense strand is paired with a sense strand comprising any combination of phosphorothioate, methylphosphonate and phosphate internucleotide linkages or an antisense strand comprising either phosphorothioate or methylphosphonate or phosphate linkage.

[0397] In some embodiments, the antisense strand of the dsRNA molecule comprises two blocks of seven phosphorothioate or methylphosphonate internucleotide linkages separated by 1, 2, 3, 4, 5, 6, 7, or 8 phosphate internucleotide linkages, wherein one of the phosphorothioate or methylphosphonate internucleotide linkages is placed at any position in the oligonucleotide sequence and the said antisense strand is paired with a sense strand comprising any combination of phosphorothioate, methylphosphonate and phosphate internucleotide linkages or an antisense strand comprising either phosphorothioate or methylphosphonate or phosphate linkage.

[0398] In some embodiments, the antisense strand of the dsRNA molecule comprises two blocks of eight phosphorothioate or methylphosphonate internucleotide linkages separated by 1, 2, 3, 4, 5, or 6 phosphate internucleotide linkages, wherein one of the phosphorothioate or methylphosphonate internucleotide linkages is placed at any position in the oligonucleotide sequence and the said antisense strand is paired with a sense strand comprising any combination of phosphorothioate, methylphosphonate and phosphate internucleotide linkages or an antisense strand comprising either phosphorothioate or methylphosphonate or phosphate linkage.

[0399] In some embodiments, the antisense strand of the dsRNA molecule comprises two blocks of nine phosphorothioate or methylphosphonate internucleotide linkages separated by 1, 2, 3, or 4 phosphate internucleotide linkages, wherein one of the phosphorothioate or methylphosphonate internucleotide linkages is placed at any position in the oligonucleotide sequence and the said antisense strand is paired with a sense strand comprising any combination of phosphorothioate, methylphosphonate and phosphate internucleotide linkages or an antisense strand comprising either phosphorothioate or methylphosphonate or phosphate linkage.

[0400] In some embodiments, the dsRNA molecule of the disclosure further comprises one or more phosphorothioate or methylphosphonate internucleotide linkage modification within 1-10 of the termini position(s) of the sense or antisense strand. For example, at least 2, 3, 4, 5, 6, 7, 8, 9, or 10 nucleotides may be linked through phosphorothioate or methylphosphonate internucleotide linkage at one end or both ends of the sense or antisense strand.

[0401] In some embodiments, the dsRNA molecule of the disclosure further comprises one or more phosphorothioate or methylphosphonate internucleotide linkage modification within 1-10 of the internal region of the duplex of each of the sense or antisense strand. For example, at least 2, 3, 4, 5, 6, 7, 8, 9, or 10 nucleotides may be linked through phosphorothioate methylphosphonate internucleotide linkage at position 8-16 of the duplex region counting from the 5′-end of the sense strand; the dsRNA molecule can optionally further comprise one or more phosphorothioate or methylphosphonate internucleotide linkage modification within 1-10 of the termini position(s).

[0402] In some embodiments, the dsRNA molecule of the disclosure further comprises one to five phosphorothioate or methylphosphonate internucleotide linkage modification(s) within position 1-5 and one to five phosphorothioate or methylphosphonate internucleotide linkage modification(s) within position 18-23 of the sense strand (counting from the 5′-end), and one to five phosphorothioate or methylphosphonate internucleotide linkage modification at positions 1 and 2 and one to five within positions 18-23 of the antisense strand (counting from the 5′-end).

[0403] In some embodiments, the dsRNA molecule of the disclosure further comprises one phosphorothioate internucleotide linkage modification within position 1-5 and one phosphorothioate or methylphosphonate internucleotide linkage modification within position 18-23 of the sense strand (counting from the 5′-end), and one phosphorothioate internucleotide linkage modification at positions 1 and 2 and two phosphorothioate or methylphosphonate internucleotide linkage modifications within positions 18-23 of the antisense strand (counting from the 5′-end).

[0404] In some embodiments, the dsRNA molecule of the disclosure further comprises two phosphorothioate internucleotide linkage modifications within position 1-5 and one phosphorothioate internucleotide linkage modification within position 18-23 of the sense strand (counting from the 5′-end), and one phosphorothioate internucleotide linkage modification at positions 1 and 2 and two phosphorothioate internucleotide linkage modifications within positions 18-23 of the antisense strand (counting from the 5′-end).

[0405] In some embodiments, the dsRNA molecule of the disclosure further comprises two phosphorothioate internucleotide linkage modifications within position 1-5 and two phosphorothioate internucleotide linkage modifications within position 18-23 of the sense strand (counting from the 5′-end), and one phosphorothioate internucleotide linkage modification at positions 1 and 2 and two phosphorothioate internucleotide linkage modifications within positions 18-23 of the antisense strand (counting from the 5′-end).

[0406] In some embodiments, the dsRNA molecule of the disclosure further comprises two phosphorothioate internucleotide linkage modifications within position 1-5 and two phosphorothioate internucleotide linkage modifications within position 18-23 of the sense strand (counting from the 5′-end), and one phosphorothioate internucleotide linkage modification at positions 1 and 2 and one phosphorothioate internucleotide linkage modification within positions 18-23 of the antisense strand (counting from the 5′-end).

[0407] In some embodiments, the dsRNA molecule of the disclosure further comprises one phosphorothioate internucleotide linkage modification within position 1-5 and one phosphorothioate internucleotide linkage modification within position 18-23 of the sense strand (counting from the 5′-end), and two phosphorothioate internucleotide linkage modifications at positions 1 and 2 and two phosphorothioate internucleotide linkage modifications within positions 18-23 of the antisense strand (counting from the 5′-end).

[0408] In some embodiments, the dsRNA molecule of the disclosure further comprises one phosphorothioate internucleotide linkage modification within position 1-5 and one within position 18-23 of the sense strand (counting from the 5′-end), and two phosphorothioate internucleotide linkage modification at positions 1 and 2 and one phosphorothioate internucleotide linkage modification within positions 18-23 of the antisense strand (counting from the 5′-end).

[0409] In some embodiments, the dsRNA molecule of the disclosure further comprises one phosphorothioate internucleotide linkage modification within position 1-5 (counting from the 5′-end) of the sense strand, and two phosphorothioate internucleotide linkage modifications at positions 1 and 2 and one phosphorothioate internucleotide linkage modification within positions 18-23 of the antisense strand (counting from the 5′-end).

[0410] In some embodiments, the dsRNA molecule of the disclosure further comprises two phosphorothioate internucleotide linkage modifications within position 1-5 (counting from the 5′-end) of the sense strand, and one phosphorothioate internucleotide linkage modification at positions 1 and 2 and two phosphorothioate internucleotide linkage modifications within positions 18-23 of the antisense strand (counting from the 5′-end).

[0411] In some embodiments, the dsRNA molecule of the disclosure further comprises two phosphorothioate internucleotide linkage modifications within position 1-5 and one within position 18-23 of the sense strand (counting from the 5′-end), and two phosphorothioate internucleotide linkage modifications at positions 1 and 2 and one phosphorothioate internucleotide linkage modification within positions 18-23 of the antisense strand (counting from the 5′-end).

[0412] In some embodiments, the dsRNA molecule of the disclosure further comprises two phosphorothioate internucleotide linkage modifications within position 1-5 and one phosphorothioate internucleotide linkage modification within position 18-23 of the sense strand (counting from the 5′-end), and two phosphorothioate internucleotide linkage modifications at positions 1 and 2 and two phosphorothioate internucleotide linkage modifications within positions 18-23 of the antisense strand (counting from the 5′-end).

[0413] In some embodiments, the dsRNA molecule of the disclosure further comprises two phosphorothioate internucleotide linkage modifications within position 1-5 and one phosphorothioate internucleotide linkage modification within position 18-23 of the sense strand (counting from the 5′-end), and one phosphorothioate internucleotide linkage modification at positions 1 and 2 and two phosphorothioate internucleotide linkage modifications within positions 18-23 of the antisense strand (counting from the 5′-end).

[0414] In some embodiments, the dsRNA molecule of the disclosure further comprises two phosphorothioate internucleotide linkage modifications at position 1 and 2, and two phosphorothioate internucleotide linkage modifications at position 20 and 21 of the sense strand (counting from the 5′-end), and one phosphorothioate internucleotide linkage modification at positions 1 and one at position 21 of the antisense strand (counting from the 5′-end).

[0415] In some embodiments, the dsRNA molecule of the disclosure further comprises one phosphorothioate internucleotide linkage modification at position 1, and one phosphorothioate internucleotide linkage modification at position 21 of the sense strand (counting from the 5′-end), and two phosphorothioate internucleotide linkage modifications at positions 1 and 2 and two phosphorothioate internucleotide linkage modifications at positions 20 and 21 of the antisense strand (counting from the 5′-end).

[0416] In some embodiments, the dsRNA molecule of the disclosure further comprises two phosphorothioate internucleotide linkage modifications at position 1 and 2, and two phosphorothioate internucleotide linkage modifications at position 21 and 22 of the sense strand (counting from the 5′-end), and one phosphorothioate internucleotide linkage modification at position 1 and one phosphorothioate internucleotide linkage modification at position 21 of the antisense strand (counting from the 5′-end).

[0417] In some embodiments, the dsRNA molecule of the disclosure further comprises one phosphorothioate internucleotide linkage modification at position 1, and one phosphorothioate internucleotide linkage modification at position 21 of the sense strand (counting from the 5′-end), and two phosphorothioate internucleotide linkage modifications at positions 1 and 2 and two phosphorothioate internucleotide linkage modifications at positions 21 and 22 of the antisense strand (counting from the 5′-end).

[0418] In some embodiments, the dsRNA molecule of the disclosure further comprises two phosphorothioate internucleotide linkage modifications at position 1 and 2, and two phosphorothioate internucleotide linkage modifications at position 22 and 23 of the sense strand (counting from the 5′-end), and one phosphorothioate internucleotide linkage modification at position 1 and one phosphorothioate internucleotide linkage modification at position 21 of the antisense strand (counting from the 5′-end).

[0419] In some embodiments, the dsRNA molecule of the disclosure further comprises one phosphorothioate internucleotide linkage modification at position 1, and one phosphorothioate internucleotide linkage modification at position 21 of the sense strand (counting from the 5′-end), and two phosphorothioate internucleotide linkage modifications at positions 1 and 2 and two phosphorothioate internucleotide linkage modifications at positions 23 and 23 of the antisense strand (counting from the 5′-end).

[0420] In some embodiments, compound of the disclosure comprises a pattern of backbone chiral centers. In some embodiments, a common pattern of backbone chiral centers comprises at least 5 internucleotidic linkages in the Sp configuration. In some embodiments, a common pattern of backbone chiral centers comprises at least 6 internucleotidic linkages in the Sp configuration. In some embodiments, a common pattern of backbone chiral centers comprises at least 7 internucleotidic linkages in the Sp configuration. In some embodiments, a common pattern of backbone chiral centers comprises at least 8 internucleotidic linkages in the Sp configuration. In some embodiments, a common pattern of backbone chiral centers comprises at least 9 internucleotidic linkages in the Sp configuration. In some embodiments, a common pattern of backbone chiral centers comprises at least 10 internucleotidic linkages in the Sp configuration. In some embodiments, a common pattern of backbone chiral centers comprises at least 11 internucleotidic linkages in the Sp configuration. In some embodiments, a common pattern of backbone chiral centers comprises at least 12 internucleotidic linkages in the Sp configuration. In some embodiments, a common pattern of backbone chiral centers comprises at least 13 internucleotidic linkages in the Sp configuration. In some embodiments, a common pattern of backbone chiral centers comprises at least 14 internucleotidic linkages in the Sp configuration. In some embodiments, a common pattern of backbone chiral centers comprises at least 15 internucleotidic linkages in the Sp configuration. In some embodiments, a common pattern of backbone chiral centers comprises at least 16 internucleotidic linkages in the Sp configuration. In some embodiments, a common pattern of backbone chiral centers comprises at least 17 internucleotidic linkages in the Sp configuration. In some embodiments, a common pattern of backbone chiral centers comprises at least 18 internucleotidic linkages in the Sp configuration. In some embodiments, a common pattern of backbone chiral centers comprises at least 19 internucleotidic linkages in the Sp configuration. In some embodiments, a common pattern of backbone chiral centers comprises no more than 8 internucleotidic linkages in the Rp configuration. In some embodiments, a common pattern of backbone chiral centers comprises no more than 7 internucleotidic linkages in the Rp configuration. In some embodiments, a common pattern of backbone chiral centers comprises no more than 6 internucleotidic linkages in the Rp configuration. In some embodiments, a common pattern of backbone chiral centers comprises no more than 5 internucleotidic linkages in the Rp configuration. In some embodiments, a common pattern of backbone chiral centers comprises no more than 4 internucleotidic linkages in the Rp configuration. In some embodiments, a common pattern of backbone chiral centers comprises no more than 3 internucleotidic linkages in the Rp configuration. In some embodiments, a common pattern of backbone chiral centers comprises no more than 2 internucleotidic linkages in the Rp configuration. In some embodiments, a common pattern of backbone chiral centers comprises no more than 1 internucleotidic linkages in the Rp configuration. In some embodiments, a common pattern of backbone chiral centers comprises no more than 8 internucleotidic linkages which are not chiral (as a non-limiting example, a phosphodiester). In some embodiments, a common pattern of backbone chiral centers comprises no more than 7 internucleotidic linkages which are not chiral. In some embodiments, a common pattern of backbone chiral centers comprises no more than 6 internucleotidic linkages which are not chiral. In some embodiments, a common pattern of backbone chiral centers comprises no more than 5 internucleotidic linkages which are not chiral. In some embodiments, a common pattern of backbone chiral centers comprises no more than 4 internucleotidic linkages which are not chiral. In some embodiments, a common pattern of backbone chiral centers comprises no more than 3 internucleotidic linkages which are not chiral. In some embodiments, a common pattern of backbone chiral centers comprises no more than 2 internucleotidic linkages which are not chiral. In some embodiments, a common pattern of backbone chiral centers comprises no more than 1 internucleotidic linkages which are not chiral. In some embodiments, a common pattern of backbone chiral centers comprises at least 10 internucleotidic linkages in the Sp configuration, and no more than 8 internucleotidic linkages which are not chiral. In some embodiments, a common pattern of backbone chiral centers comprises at least 11 internucleotidic linkages in the Sp configuration, and no more than 7 internucleotidic linkages which are not chiral. In some embodiments, a common pattern of backbone chiral centers comprises at least 12 internucleotidic linkages in the Sp configuration, and no more than 6 internucleotidic linkages which are not chiral. In some embodiments, a common pattern of backbone chiral centers comprises at least 13 internucleotidic linkages in the Sp configuration, and no more than 6 internucleotidic linkages which are not chiral. In some embodiments, a common pattern of backbone chiral centers comprises at least 14 internucleotidic linkages in the Sp configuration, and no more than 5 internucleotidic linkages which are not chiral. In some embodiments, a common pattern of backbone chiral centers comprises at least 15 internucleotidic linkages in the Sp configuration, and no more than 4 internucleotidic linkages which are not chiral. In some embodiments, the internucleotidic linkages in the Sp configuration are optionally contiguous or not contiguous. In some embodiments, the internucleotidic linkages in the Rp configuration are optionally contiguous or not contiguous. In some embodiments, the internucleotidic linkages which are not chiral are optionally contiguous or not contiguous.

[0421] In some embodiments, compound of the disclosure comprises a block is a stereochemistry block. In some embodiments, a block is an Rp block in that each internucleotidic linkage of the block is Rp. In some embodiments, a 5′-block is an Rp block. In some embodiments, a 3′-block is an Rp block. In some embodiments, a block is an Sp block in that each internucleotidic linkage of the block is Sp. In some embodiments, a 5′-block is an Sp block. In some embodiments, a 3′-block is an Sp block. In some embodiments, provided oligonucleotides comprise both Rp and Sp blocks. In some embodiments, provided oligonucleotides comprise one or more Rp but no Sp blocks. In some embodiments, provided oligonucleotides comprise one or more Sp but no Rp blocks. In some embodiments, provided oligonucleotides comprise one or more PO blocks wherein each internucleotidic linkage in a natural phosphate linkage.

[0422] In some embodiments, compound of the disclosure comprises a 5′-block is an Sp block wherein each sugar moiety comprises a 2′-F modification. In some embodiments, a 5′-block is an Sp block wherein each of internucleotidic linkage is a modified internucleotidic linkage and each sugar moiety comprises a 2′-F modification. In some embodiments, a 5′-block is an Sp block wherein each of internucleotidic linkage is a phosphorothioate linkage and each sugar moiety comprises a 2′-F modification. In some embodiments, a 5′-block comprises 4 or more nucleoside units. In some embodiments, a 5′-block comprises 5 or more nucleoside units. In some embodiments, a 5′-block comprises 6 or more nucleoside units. In some embodiments, a 5′-block comprises 7 or more nucleoside units. In some embodiments, a 3′-block is an Sp block wherein each sugar moiety comprises a 2′-F modification. In some embodiments, a 3′-block is an Sp block wherein each of internucleotidic linkage is a modified internucleotidic linkage and each sugar moiety comprises a 2′-F modification. In some embodiments, a 3′-block is an Sp block wherein each of internucleotidic linkage is a phosphorothioate linkage and each sugar moiety comprises a 2′-F modification. In some embodiments, a 3′-block comprises 4 or more nucleoside units. In some embodiments, a 3′-block comprises 5 or more nucleoside units. In some embodiments, a 3′-block comprises 6 or more nucleoside units. In some embodiments, a 3′-block comprises 7 or more nucleoside units.

[0423] In some embodiments, compound of the disclosure comprises a type of nucleoside in a region or an oligonucleotide is followed by a specific type of internucleotidic linkage, e.g., natural phosphate linkage, modified internucleotidic linkage, Rp chiral internucleotidic linkage, Sp chiral internucleotidic linkage, etc. In some embodiments, A is followed by Sp. In some embodiments, A is followed by Rp. In some embodiments, A is followed by natural phosphate linkage (PO). In some embodiments, U is followed by Sp. In some embodiments, U is followed by Rp. In some embodiments, U is followed by natural phosphate linkage (PO). In some embodiments, C is followed by Sp. In some embodiments, C is followed by Rp. In some embodiments, C is followed by natural phosphate linkage (PO). In some embodiments, G is followed by Sp. In some embodiments, G is followed by Rp. In some embodiments, G is followed by natural phosphate linkage (PO). In some embodiments, C and U are followed by Sp. In some embodiments, C and U are followed by Rp. In some embodiments, C and U are followed by natural phosphate linkage (PO). In some embodiments, A and G are followed by Sp. In some embodiments, A and G are followed by Rp.

[0424] In some embodiments, the antisense strand comprises phosphorothioate internucleotide linkages between nucleotide positions 21 and 22, and between nucleotide positions 22 and 23, wherein the antisense strand contains at least one thermally destabilizing modification of the duplex located in the seed region of the antisense strand (i.e., at position 2-9 of the 5′-end of the antisense strand or at positions 2-8 of the 5′-end of the antisense strand), and wherein the dsRNA optionally further has at least one (e.g., one, two, three, four, five, six, seven or all eight) of the following characteristics: (i) the antisense comprises 2, 3, 4, 5 or 6 2′-fluoro modifications; (ii) the antisense comprises 3, 4 or 5 phosphorothioate internucleotide linkages; (iii) the sense strand is conjugated with a ligand; (iv) the sense strand comprises 2, 3, 4 or 5 2′-fluoro modifications; (v) the sense strand comprises 1, 2, 3, 4 or 5 phosphorothioate internucleotide linkages; (vi) the dsRNA comprises at least four 2′-fluoro modifications; (vii) the dsRNA comprises a duplex region of 12-40 nucleotide pairs in length; and (viii) the dsRNA has a blunt end at 5′-end of the antisense strand.

[0425] In some embodiments, the antisense strand comprises phosphorothioate internucleotide linkages between nucleotide positions 1 and 2, between nucleotide positions 2 and 3, between nucleotide positions 21 and 22, and between nucleotide positions 22 and 23, wherein the antisense strand contains at least one thermally destabilizing modification of the duplex located in the seed region of the antisense strand (i.e., at position 2-9 of the 5′-end of the antisense strand or at positions 2-8 of the 5′-end of the antisense strand), and wherein the dsRNA optionally further has at least one (e.g., one, two, three, four, five, six, seven or all eight) of the following characteristics: (i) the antisense comprises 2, 3, 4, 5 or 6 2′-fluoro modifications; (ii) the sense strand is conjugated with a ligand; (iii) the sense strand comprises 2, 3, 4 or 5 2′-fluoro modifications; (iv) the sense strand comprises 1, 2, 3, 4 or 5 phosphorothioate internucleotide linkages; (v) the dsRNA comprises at least four 2′-fluoro modifications; (vi) the dsRNA comprises a duplex region of 12-40 nucleotide pairs in length; (vii) the dsRNA comprises a duplex region of 12-40 nucleotide pairs in length; and (viii) the dsRNA has a blunt end at 5′-end of the antisense strand.

[0426] In some embodiments, the sense strand comprises phosphorothioate internucleotide linkages between nucleotide positions 1 and 2, and between nucleotide positions 2 and 3, wherein the antisense strand contains at least one thermally destabilizing modification of the duplex located in the seed region of the antisense strand (i.e., at position 2-9 of the 5′-end of the antisense strand or at positions 2-8 of the 5′-end of the antisense strand), and wherein the dsRNA optionally further has at least one (e.g., one, two, three, four, five, six, seven or all eight) of the following characteristics: (i) the antisense comprises 2, 3, 4, 5 or 6 2′-fluoro modifications; (ii) the antisense comprises 1, 2, 3, 4 or 5 phosphorothioate internucleotide linkages; (iii) the sense strand is conjugated with a ligand; (iv) the sense strand comprises 2, 3, 4 or 5 2′-fluoro modifications; (v) the sense strand comprises 3, 4 or 5 phosphorothioate internucleotide linkages; (vi) the dsRNA comprises at least four 2′-fluoro modifications; (vii) the dsRNA comprises a duplex region of 12-40 nucleotide pairs in length; and (viii) the dsRNA has a blunt end at 5′-end of the antisense strand.

[0427] In some embodiments, the sense strand comprises phosphorothioate internucleotide linkages between nucleotide positions 1 and 2, and between nucleotide positions 2 and 3, the antisense strand comprises phosphorothioate internucleotide linkages between nucleotide positions 1 and 2, between nucleotide positions 2 and 3, between nucleotide positions 21 and 22, and between nucleotide positions 22 and 23, wherein the antisense strand contains at least one thermally destabilizing modification of the duplex located in the seed region of the antisense strand (i.e., at position 2-9 of the 5′-end of the antisense strand or at positions 2-8 of the 5′-end of the antisense strand), and wherein the dsRNA optionally further has at least one (e.g., one, two, three, four, five, six or all seven) of the following characteristics: (i) the antisense comprises 2, 3, 4, 5 or 6 2′-fluoro modifications; (ii) the sense strand is conjugated with a ligand; (iii) the sense strand comprises 2, 3, 4 or 5 2′-fluoro modifications; (iv) the sense strand comprises 3, 4 or 5 phosphorothioate internucleotide linkages; (v) the dsRNA comprises at least four 2′-fluoro modifications; (vi) the dsRNA comprises a duplex region of 12-40 nucleotide pairs in length; and (vii) the dsRNA has a blunt end at 5′-end of the antisense strand.

[0428] In some embodiments, the dsRNA molecule of the disclosure comprises mismatch(es) with the target, within the duplex, or combinations thereof. The mismatch can occur in the overhang region or the duplex region. The base pair can be ranked on the basis of their propensity to promote dissociation or melting (e.g., on the free energy of association or dissociation of a particular pairing, the simplest approach is to examine the pairs on an individual pair basis, though next neighbor or similar analysis can also be used). In terms of promoting dissociation: A:U is preferred over G:C; G:U is preferred over G:C; and I:C is preferred over G:C (I=inosine). Mismatches, e.g., non-canonical or other than canonical pairings (as described elsewhere herein) are preferred over canonical (A:T, A:U, G:C) pairings; and pairings which include a universal base are preferred over canonical pairings.

[0429] In some embodiments, the dsRNA molecule of the disclosure comprises at least one of the first 1, 2, 3, 4, or 5 base pairs within the duplex regions from the 5′-end of the antisense strand can be chosen independently from the group of: A:U, G:U, I:C, and mismatched pairs, e.g., non-canonical or other than canonical pairings or pairings which include a universal base, to promote the dissociation of the antisense strand at the 5′-end of the duplex.

[0430] In some embodiments, the nucleotide at the 1 position within the duplex region from the 5′-end in the antisense strand is selected from the group consisting of A, dA, dU, U, and dT. Alternatively, at least one of the first 1, 2 or 3 base pair within the duplex region from the 5′-end of the antisense strand is an AU base pair. For example, the first base pair within the duplex region from the 5′-end of the antisense strand is an AU base pair.

[0431] It was found that introducing 4′-modified or 5′-modified nucleotide to the 3′-end of a phosphodiester (PO), phosphorothioate (PS), or phosphorodithioate (PS2) linkage of a dinucleotide at any position of single stranded or double stranded oligonucleotide can exert steric effect to the internucleotide linkage and, hence, protecting or stabilizing it against nucleases.

[0432] In some embodiments, 5′-modified nucleoside is introduced at the 3′-end of a dinucleotide at any position of single stranded or double stranded siRNA. For instance, a 5′-alkylated nucleoside may be introduced at the 3′-end of a dinucleotide at any position of single stranded or double stranded siRNA. The alkyl group at the 5′ position of the ribose sugar can be racemic or chirally pure R or S isomer. An exemplary 5′-alkylated nucleoside is 5′-methyl nucleoside. The 5′-methyl can be either racemic or chirally pure R or S isomer.

[0433] In some embodiments, 4′-modified nucleoside is introduced at the 3′-end of a dinucleotide at any position of single stranded or double stranded siRNA. For instance, a 4′-alkylated nucleoside may be introduced at the 3′-end of a dinucleotide at any position of single stranded or double stranded siRNA. The alkyl group at the 4′ position of the ribose sugar can be racemic or chirally pure R or S isomer. An exemplary 4′-alkylated nucleoside is 4′-methyl nucleoside. The 4′-methyl can be either racemic or chirally pure R or S isomer. Alternatively, a 4′-O-alkylated nucleoside may be introduced at the 3′-end of a dinucleotide at any position of single stranded or double stranded siRNA. The 4′-O-alkyl of the ribose sugar can be racemic or chirally pure R or S isomer. An exemplary 4′-O-alkylated nucleoside is 4′-O-methyl nucleoside. The 4′-O-methyl can be either racemic or chirally pure R or S isomer.

[0434] In some embodiments, 5′-alkylated nucleoside is introduced at any position on the sense strand or antisense strand of a dsRNA, and such modification maintains or improves potency of the dsRNA. The 5′-alkyl can be either racemic or chirally pure R or S isomer. An exemplary 5′-alkylated nucleoside is 5′-methyl nucleoside. The 5′-methyl can be either racemic or chirally pure R or S isomer.

[0435] In some embodiments, 4′-alkylated nucleoside is introduced at any position on the sense strand or antisense strand of a dsRNA, and such modification maintains or improves potency of the dsRNA. The 4′-alkyl can be either racemic or chirally pure R or S isomer. An exemplary 4′-alkylated nucleoside is 4′-methyl nucleoside. The 4′-methyl can be either racemic or chirally pure R or S isomer.

[0436] In some embodiments, 4′-O-alkylated nucleoside is introduced at any position on the sense strand or antisense strand of a dsRNA, and such modification maintains or improves potency of the dsRNA. The 5′-alkyl can be either racemic or chirally pure R or S isomer. An exemplary 4′-O-alkylated nucleoside is 4′-O-methyl nucleoside. The 4′-O-methyl can be either racemic or chirally pure R or S isomer.

[0437] In some embodiments, the dsRNA molecule of the disclosure can comprise 2′-5′ linkages (with 2′-H, 2′-OH and 2′-OMe and with P═O or P═S). For example, the 2′-5′ linkages modifications can be used to promote nuclease resistance or to inhibit binding of the sense to the antisense strand, or can be used at the 5′ end of the sense strand to avoid sense strand activation by RISC.

[0438] In another embodiment, the dsRNA molecule of the disclosure can comprise L sugars (e.g., L ribose, L-arabinose with 2′-H, 2′-OH and 2′-OMe). For example, these L sugars modifications can be used to promote nuclease resistance or to inhibit binding of the sense to the antisense strand, or can be used at the 5′ end of the sense strand to avoid sense strand activation by RISC.

[0439] Various publications describe multimeric siRNA which can all be used with the dsRNA of the disclosure. Such publications include WO2007/091269, U.S. Pat. No. 7,858,769, WO2010/141511, WO2007/117686, WO2009/014887, and WO2011/031520 which are hereby incorporated by their entirely.

[0440] As described in more detail below, the RNAi agent that contains conjugations of one or more carbohydrate moieties to an RNAi agent can optimize one or more properties of the RNAi agent. In many cases, the carbohydrate moiety will be attached to a modified subunit of the RNAi agent. For example, the ribose sugar of one or more ribonucleotide subunits of a dsRNA agent can be replaced with another moiety, e.g., a non-carbohydrate (preferably cyclic) carrier to which is attached a carbohydrate ligand. A ribonucleotide subunit in which the ribose sugar of the subunit has been so replaced is referred to herein as a ribose replacement modification subunit (RRMS). A cyclic carrier may be a carbocyclic ring system, i.e., all ring atoms are carbon atoms, or a heterocyclic ring system, i.e., one or more ring atoms may be a heteroatom, e.g., nitrogen, oxygen, sulfur. The cyclic carrier may be a monocyclic ring system, or may contain two or more rings, e.g. fused rings. The cyclic carrier may be a fully saturated ring system, or it may contain one or more double bonds.

[0441] The ligand may be attached to the polynucleotide via a carrier. The carriers include (i) at least one “backbone attachment point,” preferably two “backbone attachment points” and (ii) at least one “tethering attachment point.” A “backbone attachment point” as used herein refers to a functional group, e.g. a hydroxyl group, or generally, a bond available for, and that is suitable for incorporation of the carrier into the backbone, e.g., the phosphate, or modified phosphate, e.g., sulfur containing, backbone, of a ribonucleic acid. A “tethering attachment point” (TAP) in some embodiments refers to a constituent ring atom of the cyclic carrier, e.g., a carbon atom or a heteroatom (distinct from an atom which provides a backbone attachment point), that connects a selected moiety. The moiety can be, e.g., a carbohydrate, e.g. monosaccharide, disaccharide, trisaccharide, tetrasaccharide, oligosaccharide and polysaccharide. Optionally, the selected moiety is connected by an intervening tether to the cyclic carrier. Thus, the cyclic carrier will often include a functional group, e.g., an amino group, or generally, provide a bond, that is suitable for incorporation or tethering of another chemical entity, e.g., a ligand to the constituent ring.

[0442] The RNAi agents may be conjugated to a ligand via a carrier, wherein the carrier can be cyclic group or acyclic group; preferably, the cyclic group is selected from pyrrolidinyl, pyrazolinyl, pyrazolidinyl, imidazolinyl, imidazolidinyl, piperidinyl, piperazinyl, [1,3]dioxolane, oxazolidinyl, isoxazolidinyl, morpholinyl, thiazolidinyl, isothiazolidinyl, quinoxalinyl, pyridazinonyl, tetrahydrofuryl and and decalin; preferably, the acyclic group is selected from serinol backbone or diethanolamine backbone.

[0443] In certain specific embodiments, the RNAi agent for use in the methods of the disclosure is an agent selected from the group of agents listed in any one of Tables 2-5. These agents may further comprise a ligand.

### IV. iRNAs Conjugated to Ligands

[0444] Another modification of the RNA of an iRNA of the invention involves chemically linking to the iRNA one or more ligands, moieties or conjugates that enhance the activity, cellular distribution or cellular uptake of the iRNA, e.g., into a cell. Such moieties include but are not limited to lipid moieties such as a cholesterol moiety (Letsinger et al., Proc. Natl. Acid. Sci. USA, 1989, 86: 6553-6556), cholic acid (Manoharan et al., Biorg. Med. Chem. Let., 1994, 4:1053-1060), a thioether, e.g., beryl-S-tritylthiol (Manoharan et al., Ann. N.Y. Acad. Sci., 1992, 660:306-309; Manoharan et al., Biorg. Med. Chem. Let., 1993, 3:2765-2770), a thiocholesterol (Oberhauser et al., Nucl. Acids Res., 1992, 20:533-538), an aliphatic chain, e.g., dodecandiol or undecyl residues (Saison-Behmoaras et al., EMBO J, 1991, 10:1111-1118; Kabanov et al., FEBS Lett., 1990, 259:327-330; Svinarchuk et al., Biochimie, 1993, 75:49-54), a phospholipid, e.g., di-hexadecyl-rac-glycerol or triethyl-ammonium 1,2-di-O-hexadecyl-rac-glycero-3-phosphonate (Manoharan et al., Tetrahedron Lett., 1995, 36:3651-3654; Shea et al., Nucl. Acids Res., 1990, 18:3777-3783), a polyamine or a polyethylene glycol chain (Manoharan et al., Nucleosides & Nucleotides, 1995, 14:969-973), or adamantane acetic acid (Manoharan et al., Tetrahedron Lett., 1995, 36:3651-3654), a palmityl moiety (Mishra et al., Biochim. Biophys. Acta, 1995, 1264:229-237), or an octadecylamine or hexylamino-carbonyloxycholesterol moiety (Crooke et al., J. Pharmacol. Exp. Ther., 1996, 277:923-937).

[0445] In certain embodiments, a ligand alters the distribution, targeting or lifetime of an iRNA agent into which it is incorporated. In some embodiments, a ligand provides an enhanced affinity for a selected target, e.g., molecule, cell or cell type, compartment, e.g., a cellular or organ compartment, tissue, organ or region of the body, as, e.g., compared to a species absent such a ligand. Typical ligands will not take part in duplex pairing in a duplexed nucleic acid.

[0446] Ligands can include a naturally occurring substance, such as a protein (e.g., human serum albumin (HSA), low-density lipoprotein (LDL), or globulin); carbohydrate (e.g., a dextran, pullulan, chitin, chitosan, inulin, cyclodextrin or hyaluronic acid); or a lipid. The ligand may also be a recombinant or synthetic molecule, such as a synthetic polymer, e.g., a synthetic polyamino acid. Examples of polyamino acids include polyamino acid is a polylysine (PLL), poly L-aspartic acid, poly L-glutamic acid, styrene-maleic acid anhydride copolymer, poly(L-lactide-co-glycolied) copolymer, divinyl ether-maleic anhydride copolymer, N-(2-hydroxypropyl)methacrylamide copolymer (HMPA), polyethylene glycol (PEG), polyvinyl alcohol (PVA), polyurethane, poly(2-ethylacryllic acid), N-isopropylacrylamide polymers, or polyphosphazine. Example of polyamines include: polyethylenimine, polylysine (PLL), spermine, spermidine, polyamine, pseudopeptide-polyamine, peptidomimetic polyamine, dendrimer polyamine, arginine, amidine, protamine, cationic lipid, cationic porphyrin, quaternary salt of a polyamine, or an a helical peptide.

[0447] Ligands can also include targeting groups, e.g., a cell or tissue targeting agent, e.g., a lectin, glycoprotein, lipid or protein, e.g., an antibody, that binds to a specified cell type such as a kidney cell. A targeting group can be a thyrotropin, melanotropin, lectin, glycoprotein, surfactant protein A, Mucin carbohydrate, multivalent lactose, multivalent galactose, N-acetyl-galactosamine, N-acetyl-glucosamine multivalent mannose, multivalent fucose, glycosylated polyaminoacids, multivalent galactose, transferrin, bisphosphonate, polyglutamate, polyaspartate, a lipid, cholesterol, a steroid, bile acid, folate, vitamin B12, biotin, or an RGD peptide or RGD peptide mimetic. In certain embodiments, the ligand is a multivalent galactose, e.g., an N-acetyl-galactosamine.

[0448] Other examples of ligands include dyes, intercalating agents (e.g. acridines), cross-linkers (e.g. psoralene, mitomycin C), porphyrins (TPPC4, texaphyrin, Sapphyrin), polycyclic aromatic hydrocarbons (e.g., phenazine, dihydrophenazine), artificial endonucleases (e.g. EDTA), lipophilic molecules, e.g., cholesterol, cholic acid, adamantane acetic acid, 1-pyrene butyric acid, dihydrotestosterone, 1,3-Bis-O(hexadecyl)glycerol, geranyloxyhexyl group, hexadecylglycerol, borneol, menthol, 1,3-propanediol, heptadecyl group, palmitic acid, myristic acid, O3-(oleoyl)lithocholic acid, O3-(oleoyl)cholenic acid, dimethoxytrityl, or phenoxazine) and peptide conjugates (e.g., antennapedia peptide, Tat peptide), alkylating agents, phosphate, amino, mercapto, PEG (e.g., PEG-40K), MPEG, [MPEG]₂, polyamino, alkyl, substituted alkyl, radiolabeled markers, enzymes, haptens (e.g. biotin), transport/absorption facilitators (e.g., aspirin, vitamin E, folic acid), synthetic ribonucleases (e.g., imidazole, bisimidazole, histamine, imidazole clusters, acridine-imidazole conjugates, Eu3+ complexes of tetraazamacrocycles), dinitrophenyl, HRP, or AP.

[0449] Ligands can be proteins, e.g., glycoproteins, or peptides, e.g., molecules having a specific affinity for a co-ligand, or antibodies e.g., an antibody, that binds to a specified cell type such as a cancer cell, endothelial cell, or bone cell. Ligands may also include hormones and hormone receptors. They can also include non-peptidic species, such as lipids, lectins, carbohydrates, vitamins, cofactors, multivalent lactose, multivalent galactose, N-acetyl-galactosamine, N-acetyl-glucosamine multivalent mannose, or multivalent fucose. The ligand can be, for example, a lipopolysaccharide, an activator of p38 MAP kinase, or an activator of NF-κB.

[0450] The ligand can be a substance, e.g., a drug, which can increase the uptake of the iRNA agent into the cell, for example, by disrupting the cell's cytoskeleton, e.g., by disrupting the cell's microtubules, microfilaments, or intermediate filaments. The drug can be, for example, taxon, vincristine, vinblastine, cytochalasin, nocodazole, japlakinolide, latrunculin A, phalloidin, swinholide A, indanocine, or myoservin.

[0451] In some embodiments, a ligand attached to an iRNA as described herein acts as a pharmacokinetic modulator (PK modulator). PK modulators include lipophiles, bile acids, steroids, phospholipid analogues, peptides, protein binding agents, PEG, vitamins etc. Exemplary PK modulators include, but are not limited to, cholesterol, fatty acids, cholic acid, lithocholic acid, dialkylglycerides, diacylglyceride, phospholipids, sphingolipids, naproxen, ibuprofen, vitamin E, biotin etc. Oligonucleotides that comprise a number of phosphorothioate linkages are also known to bind to serum protein, thus short oligonucleotides, e.g., oligonucleotides of about 5 bases, 10 bases, 15 bases or 20 bases, comprising multiple of phosphorothioate linkages in the backbone are also amenable to the present invention as ligands (e.g. as PK modulating ligands). In addition, aptamers that bind serum components (e.g. serum proteins) are also suitable for use as PK modulating ligands in the embodiments described herein.

[0452] Ligand-conjugated iRNAs of the invention may be synthesized by the use of an oligonucleotide that bears a pendant reactive functionality, such as that derived from the attachment of a linking molecule onto the oligonucleotide (described below). This reactive oligonucleotide may be reacted directly with commercially-available ligands, ligands that are synthesized bearing any of a variety of protecting groups, or ligands that have a linking moiety attached thereto.

[0453] The oligonucleotides used in the conjugates of the present invention may be conveniently and routinely made through the well-known technique of solid-phase synthesis. Equipment for such synthesis is sold by several vendors including, for example, Applied Biosystems® (Foster City, Calif.). Any other means for such synthesis known in the art may additionally or alternatively be employed. It is also known to use similar techniques to prepare other oligonucleotides, such as the phosphorothioates and alkylated derivatives.

[0454] In the ligand-conjugated oligonucleotides and ligand-molecule bearing sequence-specific linked nucleosides of the present invention, the oligonucleotides and oligonucleosides may be assembled on a suitable DNA synthesizer utilizing standard nucleotide or nucleoside precursors, or nucleotide or nucleoside conjugate precursors that already bear the linking moiety, ligand-nucleotide or nucleoside-conjugate precursors that already bear the ligand molecule, or non-nucleoside ligand-bearing building blocks.

[0455] When using nucleotide-conjugate precursors that already bear a linking moiety, the synthesis of the sequence-specific linked nucleosides is typically completed, and the ligand molecule is then reacted with the linking moiety to form the ligand-conjugated oligonucleotide. In some embodiments, the oligonucleotides or linked nucleosides of the present invention are synthesized by an automated synthesizer using phosphoramidites derived from ligand-nucleoside conjugates in addition to the standard phosphoramidites and non-standard phosphoramidites that are commercially available and routinely used in oligonucleotide synthesis.

### A. Lipid Conjugates

[0456] In certain embodiments, the ligand or conjugate is a lipid or lipid-based molecule. Such a lipid or lipid-based molecule can typically bind a serum protein, such as human serum albumin (HSA). An HSA binding ligand allows for distribution of the conjugate to a target tissue, e.g., a non-kidney target tissue of the body. For example, the target tissue can be the liver, including parenchymal cells of the liver. Other molecules that can bind HSA can also be used as ligands. For example, naproxen or aspirin can be used. A lipid or lipid-based ligand can (a) increase resistance to degradation of the conjugate, (b) increase targeting or transport into a target cell or cell membrane, or (c) can be used to adjust binding to a serum protein, e.g., HSA.

[0457] A lipid-based ligand can be used to modulate, e.g., control (e.g., inhibit) the binding of the conjugate to a target tissue. For example, a lipid or lipid-based ligand that binds to HSA more strongly will be less likely to be targeted to the kidney and therefore less likely to be cleared from the body. A lipid or lipid-based ligand that binds to HSA less strongly can be used to target the conjugate to the kidney.

[0458] In certain embodiments, the lipid-based ligand binds HSA. For example, the ligand can bind HSA with a sufficient affinity such that distribution of the conjugate to a non-kidney tissue is enhanced. However, the affinity is typically not so strong that the HSA-ligand binding cannot be reversed.

[0459] In certain embodiments, the lipid-based ligand binds HSA weakly or not at all, such that distribution of the conjugate to the kidney is enhanced. Other moieties that target to kidney cells can also be used in place of or in addition to the lipid-based ligand.

[0460] In another aspect, the ligand is a moiety, e.g., a vitamin, which is taken up by a target cell, e.g., a proliferating cell. These are particularly useful for treating disorders characterized by unwanted cell proliferation, e.g., of the malignant or non-malignant type, e.g., cancer cells. Exemplary vitamins include vitamin A, E, and K. Other exemplary vitamins include are B vitamin, e.g., folic acid, B12, riboflavin, biotin, pyridoxal or other vitamins or nutrients taken up by cancer cells. Also included are HSA and low density lipoprotein (LDL).

### B. Cell Permeation Agents

[0461] In another aspect, the ligand is a cell-permeation agent, such as a helical cell-permeation agent. In certain embodiments, the agent is amphipathic. An exemplary agent is a peptide such as tat or antennopedia. If the agent is a peptide, it can be modified, including a peptidylmimetic, invertomers, non-peptide or pseudo-peptide linkages, and use of D-amino acids. The helical agent is typically an α-helical agent and can have a lipophilic and a lipophobic phase.

[0462] The ligand can be a peptide or peptidomimetic. A peptidomimetic (also referred to herein as an oligopeptidomimetic) is a molecule capable of folding into a defined three-dimensional structure similar to a natural peptide. The attachment of peptide and peptidomimetics to iRNA agents can affect pharmacokinetic distribution of the iRNA, such as by enhancing cellular recognition and absorption. The peptide or peptidomimetic moiety can be about 5-50 amino acids long, e.g., about 5, 10, 15, 20, 25, 30, 35, 40, 45, or 50 amino acids long.

[0463] A peptide or peptidomimetic can be, for example, a cell permeation peptide, cationic peptide, amphipathic peptide, or hydrophobic peptide (e.g., consisting primarily of Tyr, Trp, or Phe). The peptide moiety can be a dendrimer peptide, constrained peptide or crosslinked peptide. In another alternative, the peptide moiety can include a hydrophobic membrane translocation sequence (MTS). An exemplary hydrophobic MTS-containing peptide is RFGF having the amino acid sequence AAVALLPAVLLALLAP (SEQ ID NO: 11). An RFGF analogue (e.g., amino acid sequence AALLPVLLAAP (SEQ ID NO: 12)) containing a hydrophobic MTS can also be a targeting moiety. The peptide moiety can be a “delivery” peptide, which can carry large polar molecules including peptides, oligonucleotides, and protein across cell membranes. For example, sequences from the HIV Tat protein (GRKKRRQRRRPPQ (SEQ ID NO: 13)) and the Drosophila Antennapedia protein (RQIKIWFQNRRMKWKK (SEQ ID NO: 14)) have been found to be capable of functioning as delivery peptides. A peptide or peptidomimetic can be encoded by a random sequence of DNA, such as a peptide identified from a phage-display library, or one-bead-one-compound (OBOC) combinatorial library (Lam et al., Nature, 354:82-84, 1991). Typically, the peptide or peptidomimetic tethered to a dsRNA agent via an incorporated monomer unit is a cell targeting peptide such as an arginine-glycine-aspartic acid (RGD)-peptide, or RGD mimic. A peptide moiety can range in length from about 5 amino acids to about 40 amino acids. The peptide moieties can have a structural modification, such as to increase stability or direct conformational properties. Any of the structural modifications described below can be utilized.

[0464] An RGD peptide for use in the compositions and methods of the invention may be linear or cyclic, and may be modified, e.g., glycosylated or methylated, to facilitate targeting to a specific tissue(s). RGD-containing peptides and peptidiomimemtics may include D-amino acids, as well as synthetic RGD mimics. In addition to RGD, one can use other moieties that target the integrin ligand. Preferred conjugates of this ligand target PECAM-1 or VEGF.

[0465] An RGD peptide moiety can be used to target a particular cell type, e.g., a tumor cell, such as an endothelial tumor cell or a breast cancer tumor cell (Zitzmann et al., Cancer Res., 62:5139-43, 2002). An RGD peptide can facilitate targeting of an dsRNA agent to tumors of a variety of other tissues, including the lung, kidney, spleen, or liver (Aoki et al., Cancer Gene Therapy 8:783-787, 2001). Typically, the RGD peptide will facilitate targeting of an iRNA agent to the kidney. The RGD peptide can be linear or cyclic, and can be modified, e.g., glycosylated or methylated to facilitate targeting to specific tissues. For example, a glycosylated RGD peptide can deliver an iRNA agent to a tumor cell expressing avB3 (Haubner et al., Jour. Nucl. Med., 42:326-336, 2001).

[0466] A “cell permeation peptide” is capable of permeating a cell, e.g., a microbial cell, such as a bacterial or fungal cell, or a mammalian cell, such as a human cell. A microbial cell-permeating peptide can be, for example, an α-helical linear peptide (e.g., LL-37 or Ceropin P1), a disulfide bond-containing peptide (e.g., α-defensin, β-defensin or bactenecin), or a peptide containing only one or two dominating amino acids (e.g., PR-39 or indolicidin). A cell permeation peptide can also include a nuclear localization signal (NLS). For example, a cell permeation peptide can be a bipartite amphipathic peptide, such as MPG, which is derived from the fusion peptide domain of HIV-1 gp41 and the NLS of SV40 large T antigen (Simeoni et al., Nucl. Acids Res. 31:2717-2724, 2003).

### C. Carbohydrate Conjugates

[0467] In some embodiments of the compositions and methods of the invention, an iRNA further comprises a carbohydrate. The carbohydrate conjugated iRNA are advantageous for the in vivo delivery of nucleic acids, as well as compositions suitable for in vivo therapeutic use, as described herein. As used herein, “carbohydrate” refers to a compound which is either a carbohydrate per se made up of one or more monosaccharide units having at least 6 carbon atoms (which can be linear, branched or cyclic) with an oxygen, nitrogen or sulfur atom bonded to each carbon atom; or a compound having as a part thereof a carbohydrate moiety made up of one or more monosaccharide units each having at least six carbon atoms (which can be linear, branched or cyclic), with an oxygen, nitrogen or sulfur atom bonded to each carbon atom. Representative carbohydrates include the sugars (mono-, di-, tri- and oligosaccharides containing from about 4, 5, 6, 7, 8, or 9 monosaccharide units), and polysaccharides such as starches, glycogen, cellulose and polysaccharide gums. Specific monosaccharides include C5 and above (e.g., C5, C6, C7, or C8) sugars; di- and tri-saccharides include sugars having two or three monosaccharide units (e.g., C5, C6, C7, or C8).

[0468] In certain embodiments, a carbohydrate conjugate comprises a monosaccharide.

[0469] In certain embodiments, the monosaccharide is an N-acetylgalactosamine (GalNAc). GalNAc conjugates, which comprise one or more N-acetylgalactosamine (GalNAc) derivatives, are described, for example, in U.S. Pat. No. 8,106,022, the entire content of which is hereby incorporated herein by reference. In some embodiments, the GalNAc conjugate serves as a ligand that targets the iRNA to particular cells. In some embodiments, the GalNAc conjugate targets the iRNA to liver cells, e.g., by serving as a ligand for the asialoglycoprotein receptor of liver cells (e.g., hepatocytes).

[0470] In some embodiments, the carbohydrate conjugate comprises one or more GalNAc derivatives. The GalNAc derivatives may be attached via a linker, e.g., a bivalent or trivalent branched linker. In some embodiments the GalNAc conjugate is conjugated to the 3′ end of the sense strand. In some embodiments, the GalNAc conjugate is conjugated to the iRNA agent (e.g., to the 3′ end of the sense strand) via a linker, e.g., a linker as described herein. In some embodiments the GalNAc conjugate is conjugated to the 5′ end of the sense strand. In some embodiments, the GalNAc conjugate is conjugated to the iRNA agent (e.g., to the 5′ end of the sense strand) via a linker, e.g., a linker as described herein.

[0471] In certain embodiments of the invention, the GalNAc or GalNAc derivative is attached to an iRNA agent of the invention via a monovalent linker. In some embodiments, the GalNAc or GalNAc derivative is attached to an iRNA agent of the invention via a bivalent linker. In yet other embodiments of the invention, the GalNAc or GalNAc derivative is attached to an iRNA agent of the invention via a trivalent linker. In other embodiments of the invention, the GalNAc or GalNAc derivative is attached to an iRNA agent of the invention via a tetravalent linker.

[0472] In certain embodiments, the double stranded RNAi agents of the invention comprise one GalNAc or GalNAc derivative attached to the iRNA agent. In certain embodiments, the double stranded RNAi agents of the invention comprise a plurality (e.g., 2, 3, 4, 5, or 6) GalNAc or GalNAc derivatives, each independently attached to a plurality of nucleotides of the double stranded RNAi agent through a plurality of monovalent linkers.

[0473] In some embodiments, for example, when the two strands of an iRNA agent of the invention are part of one larger molecule connected by an uninterrupted chain of nucleotides between the 3′-end of one strand and the 5′-end of the respective other strand forming a hairpin loop comprising, a plurality of unpaired nucleotides, each unpaired nucleotide within the hairpin loop may independently comprise a GalNAc or GalNAc derivative attached via a monovalent linker. The hairpin loop may also be formed by an extended overhang in one strand of the duplex.

[0474] In some embodiments, for example, when the two strands of an iRNA agent of the invention are part of one larger molecule connected by an uninterrupted chain of nucleotides between the 3′-end of one strand and the 5′-end of the respective other strand forming a hairpin loop comprising, a plurality of unpaired nucleotides, each unpaired nucleotide within the hairpin loop may independently comprise a GalNAc or GalNAc derivative attached via a monovalent linker. The hairpin loop may also be formed by an extended overhang in one strand of the duplex.

[0475] In some embodiments, the GalNAc conjugate is

[chemical structure]

[0476] In some embodiments, the RNAi agent is attached to the carbohydrate conjugate via a linker as shown in the following schematic, wherein X is O or S

[chemical structure]

[0477] In some embodiments, the RNAi agent is conjugated to L96 as defined in Table 1 and shown below:

[chemical structure]

[0478] In certain embodiments, a carbohydrate conjugate for use in the compositions and methods of the invention is selected from the group consisting of:

[chemical structure]

[chemical structure]

[chemical structure]

[chemical structure]

[chemical structure]

wherein Y is O or S and n is 3-6 (Formula XXIV);

[chemical structure]

wherein Y is O or S and n is 3-6 (Formula XXV);

[chemical structure]

wherein X is O or S (Formula XXVII);

[chemical structure]

[chemical structure]

[chemical structure]

[0479] In certain embodiments, a carbohydrate conjugate for use in the compositions and methods of the invention is a monosaccharide. In certain embodiments, the monosaccharide is an N-acetylgalactosamine, such as

[chemical structure]

[0480] In some embodiments, the RNAi agent is attached to the carbohydrate conjugate via a linker as shown in the following schematic, wherein X is O or S

[chemical structure]

[0481] In some embodiments, the RNAi agent is conjugated to L96 as defined in Table 1 and shown below:

[chemical structure]

[0482] Another representative carbohydrate conjugate for use in the embodiments described herein includes, but is not limited to,

[chemical structure]

[0483] when one of X or Y is an oligonucleotide, the other is a hydrogen.

[0484] In some embodiments, a suitable ligand is a ligand disclosed in WO 2019/055633, the entire contents of which are incorporated herein by reference. In one embodiment the ligand comprises the structure below:

[chemical structure]

[0485] In certain embodiments, the RNAi agents of the disclosure may include GalNAc ligands, even if such GalNAc ligands are currently projected to be of limited value for the preferred intrathecal/CNS delivery route(s) of the instant disclosure.

[0486] In certain embodiments of the invention, the GalNAc or GalNAc derivative is attached to an iRNA agent of the invention via a monovalent linker. In some embodiments, the GalNAc or GalNAc derivative is attached to an iRNA agent of the invention via a bivalent linker. In yet other embodiments of the invention, the GalNAc or GalNAc derivative is attached to an iRNA agent of the invention via a trivalent linker.

[0487] In one embodiment, the double stranded RNAi agents of the invention comprise one or more GalNAc or GalNAc derivative attached to the iRNA agent. The GalNAc may be attached to any nucleotide via a linker on the sense strand or antisense strand. The GalNac may be attached to the 5′-end of the sense strand, the 3′ end of the sense strand, the 5′-end of the antisense strand, or the 3′-end of the antisense strand. In one embodiment, the GalNAc is attached to the 3′ end of the sense strand, e.g., via a trivalent linker.

[0488] In other embodiments, the double stranded RNAi agents of the invention comprise a plurality (e.g., 2, 3, 4, 5, or 6) GalNAc or GalNAc derivatives, each independently attached to a plurality of nucleotides of the double stranded RNAi agent through a plurality of linkers, e.g., monovalent linkers.

[0489] In some embodiments, for example, when the two strands of an iRNA agent of the invention is part of one larger molecule connected by an uninterrupted chain of nucleotides between the 3′-end of one strand and the 5′-end of the respective other strand forming a hairpin loop comprising, a plurality of unpaired nucleotides, each unpaired nucleotide within the hairpin loop may independently comprise a GalNAc or GalNAc derivative attached via a monovalent linker.

[0490] In some embodiments, the carbohydrate conjugate further comprises one or more additional ligands as described above, such as, but not limited to, a PK modulator or a cell permeation peptide.

[0491] Additional carbohydrate conjugates and linkers suitable for use in the present invention include those described in WO 2014/179620 and WO 2014/179627, the entire contents of each of which are incorporated herein by reference.

### D. Linkers

[0492] In some embodiments, the conjugate or ligand described herein can be attached to an iRNA oligonucleotide with various linkers that can be cleavable or non-cleavable.

[0493] The term “linker” or “linking group” means an organic moiety that connects two parts of a compound, e.g., covalently attaches two parts of a compound. Linkers typically comprise a direct bond or an atom such as oxygen or sulfur, a unit such as NR8, C(O), C(O)NH, SO, SO₂, SO₂NH or a chain of atoms, such as, but not limited to, substituted or unsubstituted alkyl, substituted or unsubstituted alkenyl, substituted or unsubstituted alkynyl, arylalkyl, arylalkenyl, arylalkynyl, heteroarylalkyl, heteroarylalkenyl, heteroarylalkynyl, heterocyclylalkyl, heterocyclylalkenyl, heterocyclylalkynyl, aryl, heteroaryl, heterocyclyl, cycloalkyl, cycloalkenyl, alkylarylalkyl, alkylarylalkenyl, alkylarylalkynyl, alkenylarylalkyl, alkenylarylalkenyl, alkenylarylalkynyl, alkynylarylalkyl, alkynylarylalkenyl, alkynylarylalkynyl, alkylheteroarylalkyl, alkylheteroarylalkenyl, alkylheteroarylalkynyl, alkenylheteroarylalkyl, alkenylheteroarylalkenyl, alkenylheteroarylalkynyl, alkynylheteroarylalkyl, alkynylheteroarylalkenyl, alkynylheteroarylalkynyl, alkylheterocyclylalkyl, alkylheterocyclylalkenyl, alkylhererocyclylalkynyl, alkenylheterocyclylalkyl, alkenylheterocyclylalkenyl, alkenylheterocyclylalkynyl, alkynylheterocyclylalkyl, alkynylheterocyclylalkenyl, alkynylheterocyclylalkynyl, alkylaryl, alkenylaryl, alkynylaryl, alkylheteroaryl, alkenylheteroaryl, alkynylhereroaryl, which one or more methylenes can be interrupted or terminated by O, S, S(O), SO₂, N(R8), C(O), substituted or unsubstituted aryl, substituted or unsubstituted heteroaryl, substituted or unsubstituted heterocyclic; where R8 is hydrogen, acyl, aliphatic or substituted aliphatic. In certain embodiments, the linker is between about 1-24 atoms, 2-24, 3-24, 4-24, 5-24, 6-24, 6-18, 7-18, 8-18 atoms, 7-17, 8-17, 6-16, 7-16, or 8-16 atoms.

[0494] A cleavable linking group is one which is sufficiently stable outside the cell, but which upon entry into a target cell is cleaved to release the two parts the linker is holding together. In a preferred embodiment, the cleavable linking group is cleaved at least about 10 times, 20, times, 30 times, 40 times, 50 times, 60 times, 70 times, 80 times, 90 times or more, or at least about 100 times faster in a target cell or under a first reference condition (which can, e.g., be selected to mimic or represent intracellular conditions) than in the blood of a subject, or under a second reference condition (which can, e.g., be selected to mimic or represent conditions found in the blood or serum).

[0495] Cleavable linking groups are susceptible to cleavage agents, e.g., pH, redox potential or the presence of degradative molecules. Generally, cleavage agents are more prevalent or found at higher levels or activities inside cells than in serum or blood. Examples of such degradative agents include: redox agents which are selected for particular substrates or which have no substrate specificity, including, e.g., oxidative or reductive enzymes or reductive agents such as mercaptans, present in cells, that can degrade a redox cleavable linking group by reduction; esterases; endosomes or agents that can create an acidic environment, e.g., those that result in a pH of five or lower; enzymes that can hydrolyze or degrade an acid cleavable linking group by acting as a general acid, peptidases (which can be substrate specific), and phosphatases.

[0496] A cleavable linkage group, such as a disulfide bond can be susceptible to pH. The pH of human serum is 7.4, while the average intracellular pH is slightly lower, ranging from about 7.1-7.3. Endosomes have a more acidic pH, in the range of 5.5-6.0, and lysosomes have an even more acidic pH at around 5.0. Some linkers will have a cleavable linking group that is cleaved at a preferred pH, thereby releasing a cationic lipid from the ligand inside the cell, or into the desired compartment of the cell.

[0497] A linker can include a cleavable linking group that is cleavable by a particular enzyme. The type of cleavable linking group incorporated into a linker can depend on the cell to be targeted. For example, a liver-targeting ligand can be linked to a cationic lipid through a linker that includes an ester group. Liver cells are rich in esterases, and therefore the linker will be cleaved more efficiently in liver cells than in cell types that are not esterase-rich. Other cell-types rich in esterases include cells of the lung, renal cortex, and testis.

[0498] Linkers that contain peptide bonds can be used when targeting cell types rich in peptidases, such as liver cells and synoviocytes.

[0499] In general, the suitability of a candidate cleavable linking group can be evaluated by testing the ability of a degradative agent (or condition) to cleave the candidate linking group. It will also be desirable to also test the candidate cleavable linking group for the ability to resist cleavage in the blood or when in contact with other non-target tissue. Thus, one can determine the relative susceptibility to cleavage between a first and a second condition, where the first is selected to be indicative of cleavage in a target cell and the second is selected to be indicative of cleavage in other tissues or biological fluids, e.g., blood or serum. The evaluations can be carried out in cell free systems, in cells, in cell culture, in organ or tissue culture, or in whole animals. It can be useful to make initial evaluations in cell-free or culture conditions and to confirm by further evaluations in whole animals. In preferred embodiments, useful candidate compounds are cleaved at least about 2, 4, 10, 20, 30, 40, 50, 60, 70, 80, 90, or about 100 times faster in the cell (or under in vitro conditions selected to mimic intracellular conditions) as compared to blood or serum (or under in vitro conditions selected to mimic extracellular conditions).

i. Redox Cleavable Linking Groups

[0500] In certain embodiments, a cleavable linking group is a redox cleavable linking group that is cleaved upon reduction or oxidation. An example of reductively cleavable linking group is a disulphide linking group (—S—S—). To determine if a candidate cleavable linking group is a suitable “reductively cleavable linking group,” or for example is suitable for use with a particular iRNA moiety and particular targeting agent one can look to methods described herein. For example, a candidate can be evaluated by incubation with dithiothreitol (DTT), or other reducing agent using reagents know in the art, which mimic the rate of cleavage which would be observed in a cell, e.g., a target cell. The candidates can also be evaluated under conditions which are selected to mimic blood or serum conditions. In one, candidate compounds are cleaved by at most about 10% in the blood. In other embodiments, useful candidate compounds are degraded at least about 2, 4, 10, 20, 30, 40, 50, 60, 70, 80, 90, or about 100 times faster in the cell (or under in vitro conditions selected to mimic intracellular conditions) as compared to blood (or under in vitro conditions selected to mimic extracellular conditions). The rate of cleavage of candidate compounds can be determined using standard enzyme kinetics assays under conditions chosen to mimic intracellular media and compared to conditions chosen to mimic extracellular media.

ii. Phosphate-Based Cleavable Linking Groups

[0501] In certain embodiments, a cleavable linker comprises a phosphate-based cleavable linking group. A phosphate-based cleavable linking group is cleaved by agents that degrade or hydrolyze the phosphate group. An example of an agent that cleaves phosphate groups in cells are enzymes such as phosphatases in cells. Examples of phosphate-based linking groups are —O—P(O)(ORk)-O—, —O—P(S)(ORk)-O—, —O—P(S)(SRk)-O—, —S—P(O)(ORk)-O—, —O—P(O)(ORk)-S—, —S—P(O)(ORk)-S—, —O—P(S)(ORk)-S—, —S—P(S)(ORk)-O—, —O—P(O)(Rk)-O—, —O—P(S)(Rk)-O—, —S—P(O)(Rk)-O—, —S—P(S)(Rk)-O—, —S—P(O)(Rk)-S—, —O—P(S)(Rk)-S—. Preferred embodiments are —O—P(O)(OH)—O—, —O—P(S)(OH)—O—, —O—P(S)(SH)—O—, —S—P(O)(OH)—O—, —O—P(O)(OH)—S—, —S—P(O)(OH)—S—, —O—P(S)(OH)—S—, —S—P(S)(OH)—O—, —O—P(O)(H)—O—, —O—P(S)(H)—O—, —S—P(O)(H)—O, —S—P(S)(H)—O—, —S—P(O)(H)—S—, —O—P(S)(H)—S—. A preferred embodiment is —O—P(O)(OH)—O—. These candidates can be evaluated using methods analogous to those described above.

iii. Acid Cleavable Linking Groups

[0502] In certain embodiments, a cleavable linker comprises an acid cleavable linking group. An acid cleavable linking group is a linking group that is cleaved under acidic conditions. In preferred embodiments acid cleavable linking groups are cleaved in an acidic environment with a pH of about 6.5 or lower (e.g., about 6.0, 5.75, 5.5, 5.25, 5.0, or lower), or by agents such as enzymes that can act as a general acid. In a cell, specific low pH organelles, such as endosomes and lysosomes can provide a cleaving environment for acid cleavable linking groups. Examples of acid cleavable linking groups include but are not limited to hydrazones, esters, and esters of amino acids. Acid cleavable groups can have the general formula —C═NN—, C(O)O, or —OC(O). A preferred embodiment is when the carbon attached to the oxygen of the ester (the alkoxy group) is an aryl group, substituted alkyl group, or tertiary alkyl group such as dimethyl pentyl or t-butyl. These candidates can be evaluated using methods analogous to those described above.

iv. Ester-Based Cleavable Linking Groups

[0503] In certain embodiments, a cleavable linker comprises an ester-based cleavable linking group. An ester-based cleavable linking group is cleaved by enzymes such as esterases and amidases in cells. Examples of ester-based cleavable linking groups include but are not limited to esters of alkylene, alkenylene and alkynylene groups. Ester cleavable linking groups have the general formula —C(O)O—, or —OC(O)—. These candidates can be evaluated using methods analogous to those described above.

v. Peptide-Based Cleavable Linking Groups

[0504] In yet another embodiment, a cleavable linker comprises a peptide-based cleavable linking group. A peptide-based cleavable linking group is cleaved by enzymes such as peptidases and proteases in cells. Peptide-based cleavable linking groups are peptide bonds formed between amino acids to yield oligopeptides (e.g., dipeptides, tripeptides etc.) and polypeptides. Peptide-based cleavable groups do not include the amide group (—C(O)NH—). The amide group can be formed between any alkylene, alkenylene or alkynelene. A peptide bond is a special type of amide bond formed between amino acids to yield peptides and proteins. The peptide based cleavage group is generally limited to the peptide bond (i.e., the amide bond) formed between amino acids yielding peptides and proteins and does not include the entire amide functional group. Peptide-based cleavable linking groups have the general formula —NHCHRAC(O)NHCHRBC(O)—, where RA and RB are the R groups of the two adjacent amino acids. These candidates can be evaluated using methods analogous to those described above.

[0505] In some embodiments, an iRNA of the invention is conjugated to a carbohydrate through a linker. Non-limiting examples of iRNA carbohydrate conjugates with linkers of the compositions and methods of the invention include but are not limited to

[chemical structure]

[chemical structure]

[chemical structure]

[chemical structure]

[chemical structure]

when one of X or Y is an oligonucleotide, the other is a hydrogen.

[0506] In certain embodiments of the compositions and methods of the invention, a ligand is one or more “GalNAc” (N-acetylgalactosamine) derivatives attached through a bivalent or trivalent branched linker.

[0507] In certain embodiments, a dsRNA of the invention is conjugated to a bivalent or trivalent branched linker selected from the group of structures shown in any of formula (XLV)-(XLVI):

[chemical structure]

[0508] wherein:
[0509] q2A, q2B, q3A, q3B, q4A, q4B, q5A, q5B and q5C represent independently for each occurrence 0-20 and wherein the repeating unit can be the same or different;
[0510] P^{2A}, P^{2B}, P^{3A}, P^{3B}, P^{4A}, P^{4B}, P^{5A}, P^{5B}, P^{5C}, T^{2A}, T^{2B}, T^{3A}, T^{3B}, T^{4A}, T^{4B}, T^{4A}, T^{5B}, T^{5C} are each independently for each occurrence absent, CO, NH, O, S, OC(O), NHC(O), CH₂, CH₂NH or CH₂O;
[0511] Q^{2A}, Q^{2B}, Q^{3A}, Q^{3B}, Q^{4A}, Q^{4B}, Q^{5A}, Q^{5B}, Q^{5C} are independently for each occurrence absent, alkylene, substituted alkylene wherein one or more methylenes can be interrupted or terminated by one or more of O, S, S(O), SO₂, N(R^{N}), C(R′)═C(R″), C≡C or C(O);
[0512] R^{2A}, R^{2B}, R^{3A}, R^{3B}, R^{4A}, R^{4B}, R^{5A}, R^{5B}, R^{5C} are each independently for each occurrence absent, NH, OS, CH₂, C(O)O, C(O)NH, NHCH(R^{a})C(O), —C(O)—CH(R^{a})—NH—, CO, CH═N—O,

[chemical structure]

or heterocyclyl;
[0513] L^{2A}, L^{2B}, L^{3A}, L^{3B}, L^{4A}, L^{4B}, L^{5A}, L^{5B} and L^{5C} represent the ligand; i.e. each independently for each occurrence a monosaccharide (such as GalNAc), disaccharide, trisaccharide, tetrasaccharide, oligosaccharide, or polysaccharide; and R^{a} is H or amino acid side chain. Trivalent conjugating GalNAc derivatives are particularly useful for use with RNAi agents for inhibiting the expression of a target gene, such as those of formula (XLIX):

[chemical structure]

[0514] wherein L^{5A}, L^{5B} and L^{5C} represent a monosaccharide, such as GalNAc derivative.

[0515] Examples of suitable bivalent and trivalent branched linker groups conjugating GalNAc derivatives include, but are not limited to, the structures recited above as formulas II, VII, XI, X, and XIII.

[0516] Representative U.S. Patents that teach the preparation of RNA conjugates include, but are not limited to, U.S. Pat. Nos. 4,828,979; 4,948,882; 5,218,105; 5,525,465; 5,541,313; 5,545,730; 5,552,538; 5,578,717, 5,580,731; 5,591,584; 5,109,124; 5,118,802; 5,138,045; 5,414,077; 5,486,603; 5,512,439; 5,578,718; 5,608,046; 4,587,044; 4,605,735; 4,667,025; 4,762,779; 4,789,737; 4,824,941; 4,835,263; 4,876,335; 4,904,582; 4,958,013; 5,082,830; 5,112,963; 5,214,136; 5,082,830; 5,112,963; 5,214,136; 5,245,022; 5,254,469; 5,258,506; 5,262,536; 5,272,250; 5,292,873; 5,317,098; 5,371,241, 5,391,723; 5,416,203, 5,451,463; 5,510,475; 5,512,667; 5,514,785; 5,565,552; 5,567,810; 5,574,142; 5,585,481; 5,587,371; 5,595,726; 5,597,696; 5,599,923; 5,599,928; 5,688,941; 6,294,664; 6,320,017; 6,576,752; 6,783,931; 6,900,297; 7,037,646; and 8,106,022, the entire contents of each of which are hereby incorporated herein by reference.

[0517] It is not necessary for all positions in a given compound to be uniformly modified, and in fact more than one of the aforementioned modifications can be incorporated in a single compound or even at a single nucleoside within an iRNA. The present invention also includes iRNA compounds that are chimeric compounds.

[0518] “Chimeric” iRNA compounds or “chimeras,” in the context of this invention, are iRNA compounds, preferably dsRNA agents, that contain two or more chemically distinct regions, each made up of at least one monomer unit, i.e., a nucleotide in the case of a dsRNA compound. These iRNAs typically contain at least one region wherein the RNA is modified so as to confer upon the iRNA increased resistance to nuclease degradation, increased cellular uptake, or increased binding affinity for the target nucleic acid. An additional region of the iRNA can serve as a substrate for enzymes capable of cleaving RNA:DNA or RNA:RNA hybrids. By way of example, RNase H is a cellular endonuclease which cleaves the RNA strand of an RNA:DNA duplex. Activation of RNase H, therefore, results in cleavage of the RNA target, thereby greatly enhancing the efficiency of iRNA inhibition of gene expression. Consequently, comparable results can often be obtained with shorter iRNAs when chimeric dsRNAs are used, compared to phosphorothioate deoxy dsRNAs hybridizing to the same target region. Cleavage of the RNA target can be routinely detected by gel electrophoresis and, if necessary, associated nucleic acid hybridization techniques known in the art.

[0519] In certain instances, the RNA of an iRNA can be modified by a non-ligand group. A number of non-ligand molecules have been conjugated to iRNAs in order to enhance the activity, cellular distribution or cellular uptake of the iRNA, and procedures for performing such conjugations are available in the scientific literature. Such non-ligand moieties have included lipid moieties, such as cholesterol (Kubo, T. et al., Biochem. Biophys. Res. Comm., 2007, 365(1):54-61; Letsinger et al., Proc. Natl. Acad. Sci. USA, 1989, 86:6553), cholic acid (Manoharan et al., Bioorg. Med. Chem. Lett., 1994, 4:1053), a thioether, e.g., hexyl-S-tritylthiol (Manoharan et al., Ann. N.Y. Acad. Sci., 1992, 660:306; Manoharan et al., Bioorg. Med. Chem. Let., 1993, 3:2765), a thiocholesterol (Oberhauser et al., Nucl. Acids Res., 1992, 20:533), an aliphatic chain, e.g., dodecandiol or undecyl residues (Saison-Behmoaras et al., EMBO J., 1991, 10:111; Kabanov et al., FEBS Lett., 1990, 259:327; Svinarchuk et al., Biochimie, 1993, 75:49), a phospholipid, e.g., di-hexadecyl-rac-glycerol or triethylammonium 1,2-di-O-hexadecyl-rac-glycero-3-H-phosphonate (Manoharan et al., Tetrahedron Lett., 1995, 36:3651; Shea et al., Nucl. Acids Res., 1990, 18:3777), a polyamine or a polyethylene glycol chain (Manoharan et al., Nucleosides & Nucleotides, 1995, 14:969), or adamantane acetic acid (Manoharan et al., Tetrahedron Lett., 1995, 36:3651), a palmityl moiety (Mishra et al., Biochim. Biophys. Acta, 1995, 1264:229), or an octadecylamine or hexylamino-carbonyl-oxycholesterol moiety (Crooke et al., J. Pharmacol. Exp. Ther., 1996, 277:923). Representative United States patents that teach the preparation of such RNA conjugates have been listed above. Typical conjugation protocols involve the synthesis of RNAs bearing an aminolinker at one or more positions of the sequence. The amino group is then reacted with the molecule being conjugated using appropriate coupling or activating reagents. The conjugation reaction can be performed either with the RNA still bound to the solid support or following cleavage of the RNA, in solution phase. Purification of the RNA conjugate by HPLC typically affords the pure conjugate.

### V. Delivery of an RNAi Agent of the Disclosure

[0520] The delivery of an RNAi agent of the disclosure to a cell e.g., a cell within a subject, such as a human subject (e.g., a subject in need thereof, such as a subject having an HTT-associated disorder, e.g., Huntington's disease, can be achieved in a number of different ways. For example, delivery may be performed by contacting a cell with an RNAi agent of the disclosure either in vitro or in vivo. In vivo delivery may also be performed directly by administering a composition comprising an RNAi agent, e.g., a dsRNA, to a subject. Alternatively, in vivo delivery may be performed indirectly by administering one or more vectors that encode and direct the expression of the RNAi agent. These alternatives are discussed further below.

[0521] In general, any method of delivering a nucleic acid molecule (in vitro or in vivo) can be adapted for use with an RNAi agent of the disclosure (see e.g., Akhtar S. and Julian R L., (1992) Trends Cell. Biol. 2(5):139-144 and WO94/02595, which are incorporated herein by reference in their entireties). For in vivo delivery, factors to consider in order to deliver an RNAi agent include, for example, biological stability of the delivered agent, prevention of non-specific effects, and accumulation of the delivered agent in the target tissue. The non-specific effects of an RNAi agent can be minimized by local administration, for example, by direct injection or implantation into a tissue or topically administering the preparation. Local administration to a treatment site maximizes local concentration of the agent, limits the exposure of the agent to systemic tissues that can otherwise be harmed by the agent or that can degrade the agent, and permits a lower total dose of the RNAi agent to be administered. Several studies have shown successful knockdown of gene products when an RNAi agent is administered locally. For example, intraocular delivery of a VEGF dsRNA by intravitreal injection in cynomolgus monkeys (Tolentino, M J. et al., (2004) Retina 24:132-138) and subretinal injections in mice (Reich, S J. et al. (2003) Mol. Vis. 9:210-216) were both shown to prevent neovascularization in an experimental model of age-related macular degeneration. In addition, direct intratumoral injection of a dsRNA in mice reduces tumor volume (Pille, J. et al. (2005) Mol. Ther. 11:267-274) and can prolong survival of tumor-bearing mice (Kim, W J. et al., (2006) Mol. Ther. 14:343-350; Li, S. et al., (2007) Mol. Ther. 15:515-523). RNA interference has also shown success with local delivery to the CNS by direct injection (Dorn, G. et al., (2004) Nucleic Acids 32:e49; Tan, P H. et al. (2005) Gene Ther. 12:59-66; Makimura, H. et al. (2002) BMC Neurosci. 3:18; Shishkina, G T., et al. (2004) Neuroscience 129:521-528; Thakker, E R., et al. (2004) Proc. Natl. Acad. Sci. U.S.A. 101:17270-17275; Akaneya, Y., et al. (2005) J. Neurophysiol. 93:594-602) and to the lungs by intranasal administration (Howard, K A. et al., (2006) Mol. Ther. 14:476-484; Zhang, X. et al., (2004) J. Biol. Chem. 279:10677-10684; Bitko, V. et al., (2005) Nat. Med. 11:50-55). For administering an RNAi agent systemically for the treatment of a disease, the RNA can be modified or alternatively delivered using a drug delivery system; both methods act to prevent the rapid degradation of the dsRNA by endo- and exo-nucleases in vivo. Modification of the RNA or the pharmaceutical carrier can also permit targeting of the RNAi agent to the target tissue and avoid undesirable off-target effects (e.g., without wishing to be bound by theory, use of GNAs as described herein has been identified to destabilize the seed region of a dsRNA, resulting in enhanced preference of such dsRNAs for on-target effectiveness, relative to off-target effects, as such off-target effects are significantly weakened by such seed region destabilization). RNAi agents can be modified by chemical conjugation to lipophilic groups such as cholesterol to enhance cellular uptake and prevent degradation. For example, an RNAi agent directed against ApoB conjugated to a lipophilic cholesterol moiety was injected systemically into mice and resulted in knockdown of apoB mRNA in both the liver and jejunum (Soutschek, J. et al., (2004) Nature 432:173-178). Conjugation of an RNAi agent to an aptamer has been shown to inhibit tumor growth and mediate tumor regression in a mouse model of prostate cancer (McNamara, J O. et al., (2006) Nat. Biotechnol. 24:1005-1015). In an alternative embodiment, the RNAi agent can be delivered using drug delivery systems such as a nanoparticle, a dendrimer, a polymer, liposomes, or a cationic delivery system. Positively charged cationic delivery systems facilitate binding of molecule RNAi agent (negatively charged) and also enhance interactions at the negatively charged cell membrane to permit efficient uptake of an RNAi agent by the cell. Cationic lipids, dendrimers, or polymers can either be bound to an RNAi agent, or induced to form a vesicle or micelle (see e.g., Kim S H. et al., (2008) Journal of Controlled Release 129(2):107-116) that encases an RNAi agent. The formation of vesicles or micelles further prevents degradation of the RNAi agent when administered systemically. Methods for making and administering cationic—RNAi agent complexes are well within the abilities of one skilled in the art (see e.g., Sorensen, D R., et al. (2003) J. Mol. Biol 327:761-766; Verma, U N. et al., (2003) Clin. Cancer Res. 9:1291-1300; Arnold, A S et al. (2007) J. Hypertens. 25:197-205, which are incorporated herein by reference in their entirety). Some non-limiting examples of drug delivery systems useful for systemic delivery of RNAi agents include DOTAP (Sorensen, D R., et al (2003), supra; Verma, U N. et al., (2003), supra), Oligofectamine, “solid nucleic acid lipid particles” (Zimmermann, T S. et al., (2006) Nature 441:111-114), cardiolipin (Chien, P Y. et al., (2005) Cancer Gene Ther. 12:321-328; Pal, A. et al., (2005) Int J. Oncol. 26:1087-1091), polyethyleneimine (Bonnet M E. et al., (2008) Pharm. Res. Aug 16 Epub ahead of print; Aigner, A. (2006) J. Biomed. Biotechnol. 71659), Arg-Gly-Asp (RGD) peptides (Liu, S. (2006) Mol. Pharm. 3:472-487), and polyamidoamines (Tomalia, D A. et al., (2007) Biochem. Soc. Trans. 35:61-67; Yoo, H. et al., (1999) Pharm. Res. 16:1799-1804). In some embodiments, an RNAi agent forms a complex with cyclodextrin for systemic administration. Methods for administration and pharmaceutical compositions of RNAi agents and cyclodextrins can be found in U.S. Pat. No. 7,427,605, which is herein incorporated by reference in its entirety.

[0522] Certain aspects of the instant disclosure relate to a method of reducing the expression of an HTT target gene in a cell, comprising contacting said cell with the double-stranded RNAi agent of the disclosure. In one embodiment, the cell is an extraheptic cell, optionally a CNS cell.

[0523] Another aspect of the disclosure relates to a method of reducing the expression of an HTT target gene in a subject, comprising administering to the subject the double-stranded RNAi agent of the disclosure.

[0524] Another aspect of the disclosure relates to a method of treating a subject having a CNS disorder, comprising administering to the subject a therapeutically effective amount of the double-stranded HTT-targeting RNAi agent of the disclosure, thereby treating the subject. Exemplary CNS disorders that can be treated by the method of the disclosure include Huntington's disease.

[0525] In one embodiment, the double-stranded RNAi agent is administered intrathecally. By intrathecal administration of the double-stranded RNAi agent, the method can reduce the expression of an HTT target gene in a brain (e.g., striatum) or spine tissue, for instance, cortex, cerebellum, cervical spine, lumbar spine, and thoracic spine.

[0526] For ease of exposition the formulations, compositions and methods in this section are discussed largely with regard to modified siRNA compounds. It may be understood, however, that these formulations, compositions and methods can be practiced with other siRNA compounds, e.g., unmodified siRNA compounds, and such practice is within the disclosure. A composition that includes an RNAi agent can be delivered to a subject by a variety of routes. Exemplary routes include: intrathecal, intravenous, topical, rectal, anal, vaginal, nasal, pulmonary, and ocular.

[0527] The RNAi agents of the disclosure can be incorporated into pharmaceutical compositions suitable for administration. Such compositions typically include one or more species of RNAi agent and a pharmaceutically acceptable carrier. As used herein the language “pharmaceutically acceptable carrier” is intended to include any and all solvents, dispersion media, coatings, antibacterial and antifungal agents, isotonic and absorption delaying agents, and the like, compatible with pharmaceutical administration. The use of such media and agents for pharmaceutically active substances is well known in the art. Except insofar as any conventional media or agent is incompatible with the active compound, use thereof in the compositions is contemplated. Supplementary active compounds can also be incorporated into the compositions.

[0528] The pharmaceutical compositions of the present disclosure may be administered in a number of ways depending upon whether local or systemic treatment is desired and upon the area to be treated. Administration may be topical (including ophthalmic, vaginal, rectal, intranasal, transdermal), oral, or parenteral. Parenteral administration includes intravenous drip, subcutaneous, intraperitoneal or intramuscular injection, or intrathecal or intraventricular administration.

[0529] The route and site of administration may be chosen to enhance targeting. For example, to target muscle cells, intramuscular injection into the muscles of interest would be a logical choice. Lung cells might be targeted by administering the RNAi agent in aerosol form. The vascular endothelial cells could be targeted by coating a balloon catheter with the RNAi agent and mechanically introducing the RNA.

[0530] Formulations for topical administration may include transdermal patches, ointments, lotions, creams, gels, drops, suppositories, sprays, liquids, and powders. Conventional pharmaceutical carriers, aqueous, powder or oily bases, thickeners and the like may be necessary or desirable. Coated condoms, gloves and the like may also be useful.

[0531] Compositions for oral administration include powders or granules, suspensions or solutions in water, syrups, elixirs or non-aqueous media, tablets, capsules, lozenges, or troches. In the case of tablets, carriers that can be used include lactose, sodium citrate and salts of phosphoric acid. Various disintegrants such as starch, and lubricating agents such as magnesium stearate, sodium lauryl sulfate and talc, are commonly used in tablets. For oral administration in capsule form, useful diluents are lactose and high molecular weight polyethylene glycols. When aqueous suspensions are required for oral use, the nucleic acid compositions can be combined with emulsifying and suspending agents. If desired, certain sweetening or flavoring agents can be added.

[0532] Compositions for intrathecal or intraventricular administration may include sterile aqueous solutions which may also contain buffers, diluents, and other suitable additives.

[0533] Formulations for parenteral administration may include sterile aqueous solutions which may also contain buffers, diluents, and other suitable additives. Intraventricular injection may be facilitated by an intraventricular catheter, for example, attached to a reservoir. For intravenous use, the total concentration of solutes may be controlled to render the preparation isotonic.

[0534] In one embodiment, the administration of the siRNA compound, e.g., a double-stranded siRNA compound, or ssiRNA compound, composition is parenteral, e.g., intravenous (e.g., as a bolus or as a diffusible infusion), intradermal, intraperitoneal, intramuscular, intrathecal, intraventricular, intracranial, subcutaneous, transmucosal, buccal, sublingual, endoscopic, rectal, oral, vaginal, topical, pulmonary, intranasal, urethral, or ocular. Administration can be provided by the subject or by another person, e.g., a health care provider. The medication can be provided in measured doses or in a dispenser which delivers a metered dose. Selected modes of delivery are discussed in more detail below.

### A. Intrathecal Administration.

[0535] In one embodiment, the double-stranded RNAi agent is delivered by intrathecal injection (i.e., injection into the spinal fluid which bathes the brain and spinal cord tissue). Intrathecal injection of RNAi agents into the spinal fluid can be performed as a bolus injection or via minipumps which can be implanted beneath the skin, providing a regular and constant delivery of siRNA into the spinal fluid. The circulation of the spinal fluid from the choroid plexus, where it is produced, down around the spinal chord and dorsal root ganglia and subsequently up past the cerebellum and over the cortex to the arachnoid granulations, where the fluid can exit the CNS, that, depending upon size, stability, and solubility of the compounds injected, molecules delivered intrathecally could hit targets throughout the entire CNS.

[0536] In some embodiments, the intrathecal administration is via a pump. The pump may be a surgically implanted osmotic pump. In one embodiment, the osmotic pump is implanted into the subarachnoid space of the spinal canal to facilitate intrathecal administration.

[0537] In some embodiments, the intrathecal administration is via an intrathecal delivery system for a pharmaceutical including a reservoir containing a volume of the pharmaceutical agent, and a pump configured to deliver a portion of the pharmaceutical agent contained in the reservoir. More details about this intrathecal delivery system may be found in WO 2015/116658, which is incorporated by reference in its entirety.

[0538] The amount of intrathecally injected RNAi agents may vary from one target gene to another target gene and the appropriate amount that has to be applied may have to be determined individually for each target gene. Typically, this amount ranges from 10 μg to 2 mg, preferably 50 g to 1500 μg, more preferably 100 μg to 1000 μg.

### B. Vector Encoded RNAi Agents of the Disclosure

[0539] RNAi agents targeting the HTT gene can be expressed from transcription units inserted into DNA or RNA vectors (see, e.g., Couture, A, et al., TIG. (1996), 12:5-10; WO 00/22113, WO 00/22114, and U.S. Pat. No. 6,054,299). Expression is preferably sustained (months or longer), depending upon the specific construct used and the target tissue or cell type. These transgenes can be introduced as a linear construct, a circular plasmid, or a viral vector, which can be an integrating or non-integrating vector. The transgene can also be constructed to permit it to be inherited as an extrachromosomal plasmid (Gassmann, et al., (1995) Proc. Natl. Acad. Sci. USA 92:1292).

[0540] The individual strand or strands of an RNAi agent can be transcribed from a promoter on an expression vector. Where two separate strands are to be expressed to generate, for example, a dsRNA, two separate expression vectors can be co-introduced (e.g., by transfection or infection) into a target cell. Alternatively, each individual strand of a dsRNA can be transcribed by promoters both of which are located on the same expression plasmid. In one embodiment, a dsRNA is expressed as inverted repeat polynucleotides joined by a linker polynucleotide sequence such that the dsRNA has a stem and loop structure.

[0541] RNAi agent expression vectors are generally DNA plasmids or viral vectors. Expression vectors compatible with eukaryotic cells, preferably those compatible with vertebrate cells, can be used to produce recombinant constructs for the expression of an RNAi agent as described herein. Delivery of RNAi agent expressing vectors can be systemic, such as by intravenous or intramuscular administration, by administration to target cells ex-planted from the patient followed by reintroduction into the patient, or by any other means that allows for introduction into a desired target cell.

[0542] Viral vector systems which can be utilized with the methods and compositions described herein include, but are not limited to, (a) adenovirus vectors; (b) retrovirus vectors, including but not limited to lentiviral vectors, moloney murine leukemia virus, etc.; (c) adeno-associated virus vectors; (d) herpes simplex virus vectors; (e) SV 40 vectors; (f) polyoma virus vectors; (g) papilloma virus vectors; (h) picornavirus vectors; (i) pox virus vectors such as an orthopox, e.g., vaccinia virus vectors or avipox, e.g. canary pox or fowl pox; and (j) a helper-dependent or gutless adenovirus. Replication-defective viruses can also be advantageous. Different vectors will or will not become incorporated into the cells' genome. The constructs can include viral sequences for transfection, if desired. Alternatively, the construct can be incorporated into vectors capable of episomal replication, e.g. EPV and EBV vectors. Constructs for the recombinant expression of an RNAi agent will generally require regulatory elements, e.g., promoters, enhancers, etc., to ensure the expression of the RNAi agent in target cells. Other aspects to consider for vectors and constructs are known in the art.

### VI. Compositions of the Invention

[0543] The present disclosure also includes compositions, including pharmaceutical compositions and formulations which include the RNAi agents of the disclosure.

[0544] In another embodiment, provided herein are pharmaceutical compositions containing an RNAi agent, or a composition, as described herein, and a pharmaceutically acceptable carrier. The pharmaceutical compositions containing the RNAi agent or the composition are useful for treating a disease or disorder associated with the expression or activity of HTT, e.g., Huntington's disease.

[0545] In some embodiments, the pharmaceutical compositions of the invention are sterile. In another embodiment, the pharmaceutical compositions of the invention are pyrogen free or non-pyrogenic.

[0546] Such pharmaceutical compositions are formulated based on the mode of delivery. One example is compositions that are formulated for systemic administration via parenteral delivery, e.g., by intravenous (IV), intramuscular (IM), or for subcutaneous (subQ) delivery. Another example is compositions that are formulated for direct delivery into the CNS, e.g., by intrathecal or intravitreal routes of injection, optionally by infusion into the brain (e.g., striatum), such as by continuous pump infusion.

[0547] The pharmaceutical compositions of the disclosure may be administered in dosages sufficient to inhibit expression of an HTT gene. In general, a suitable dose of an RNAi agent of the disclosure will be in the range of about 0.001 to about 200.0 milligrams per kilogram body weight of the recipient per day, generally in the range of about 1 to 50 mg per kilogram body weight per day.

[0548] A repeat-dose regimen may include administration of a therapeutic amount of an RNAi agent on a regular basis, such as monthly to once every six months. In certain embodiments, the RNAi agent is administered about once per quarter (i.e., about once every three months) to about twice per year.

[0549] After an initial treatment regimen (e.g., loading dose), the treatments can be administered on a less frequent basis.

[0550] In other embodiments, a single dose of the pharmaceutical compositions can be long lasting, such that subsequent doses are administered at not more than 1, 2, 3, or 4 or more month intervals. In some embodiments of the disclosure, a single dose of the pharmaceutical compositions of the disclosure is administered once per month. In other embodiments of the disclosure, a single dose of the pharmaceutical compositions of the disclosure is administered once per quarter to twice per year.

[0551] The skilled artisan will appreciate that certain factors can influence the dosage and timing required to effectively treat a subject, including but not limited to the severity of the disease or disorder, previous treatments, the general health or age of the subject, and other diseases present. Moreover, treatment of a subject with a therapeutically effective amount of a composition can include a single treatment or a series of treatments.

[0552] Advances in mouse genetics have generated a number of mouse models for the study of various human diseases, such as HD that would benefit from reduction in the expression of HTT. Such models can be used for in vivo testing of RNAi agents, as well as for determining a therapeutically effective dose. Suitable rodent models are known in the art and include, for example, those described in, for example, Cepeda, et al. (ASN Neuro (2010) 2(2):e00033) and Pouladi, et al. (Nat Reviews (2013) 14:708).

[0553] The pharmaceutical compositions of the present disclosure can be administered in a number of ways depending upon whether local or systemic treatment is desired and upon the area to be treated. Administration can be topical (e.g., by a transdermal patch), pulmonary, e.g., by inhalation or insufflation of powders or aerosols, including by nebulizer; intratracheal, intranasal, epidermal and transdermal, oral or parenteral. Parenteral administration includes intravenous, intraarterial, subcutaneous, intraperitoneal or intramuscular injection or infusion; subdermal, e.g., via an implanted device; or intracranial, e.g., by intraparenchymal, intrathecal or intraventricular, administration.

[0554] The RNAi agents can be delivered in a manner to target a particular tissue, such as the CNS (e.g., neuronal, glial or vascular tissue of the brain).

[0555] Pharmaceutical compositions and formulations for topical administration can include transdermal patches, ointments, lotions, creams, gels, drops, suppositories, sprays, liquids and powders. Conventional pharmaceutical carriers, aqueous, powder or oily bases, thickeners and the like can be necessary or desirable. Coated condoms, gloves and the like can also be useful. Suitable topical formulations include those in which the RNAi agents featured in the disclosure are in admixture with a topical delivery agent such as lipids, liposomes, fatty acids, fatty acid esters, steroids, chelating agents and surfactants. Suitable lipids and liposomes include neutral (e.g., dioleoylphosphatidyl DOPE ethanolamine, dimyristoylphosphatidyl choline DMPC, distearolyphosphatidyl choline) negative (e.g., dimyristoylphosphatidyl glycerol DMPG) and cationic (e.g., dioleoyltetramethylaminopropyl DOTAP and dioleoylphosphatidyl ethanolamine DOTMA). RNAi agents featured in the disclosure can be encapsulated within liposomes or can form complexes thereto, in particular to cationic liposomes. Alternatively, RNAi agents can be complexed to lipids, in particular to cationic lipids. Suitable fatty acids and esters include but are not limited to arachidonic acid, oleic acid, eicosanoic acid, lauric acid, caprylic acid, capric acid, myristic acid, palmitic acid, stearic acid, linoleic acid, linolenic acid, dicaprate, tricaprate, monoolein, dilaurin, glyceryl 1-monocaprate, 1-dodecylazacycloheptan-2-one, an acylcarnitine, an acylcholine, or a C₁₋₂₀ alkyl ester (e.g., isopropylmyristate IPM), monoglyceride, diglyceride or pharmaceutically acceptable salt thereof. Topical formulations are described in detail in U.S. Pat. No. 6,747,014, which is incorporated herein by reference.

### A. RNAi Agent Formulations Comprising Membranous Molecular Assemblies

[0556] An RNAi agent for use in the compositions and methods of the disclosure can be formulated for delivery in a membranous molecular assembly, e.g., a liposome or a micelle. As used herein, the term “liposome” refers to a vesicle composed of amphiphilic lipids arranged in at least one bilayer, e.g., one bilayer or a plurality of bilayers. Liposomes include unilamellar and multilamellar vesicles that have a membrane formed from a lipophilic material and an aqueous interior. The aqueous portion contains the RNAi agent composition. The lipophilic material isolates the aqueous interior from an aqueous exterior, which typically does not include the RNAi agent composition, although in some examples, it may. Liposomes are useful for the transfer and delivery of active ingredients to the site of action. Because the liposomal membrane is structurally similar to biological membranes, when liposomes are applied to a tissue, the liposomal bilayer fuses with bilayer of the cellular membranes. As the merging of the liposome and cell progresses, the internal aqueous contents that include the RNAi agent are delivered into the cell where the RNAi agent can specifically bind to a target RNA and can mediate RNAi. In some cases the liposomes are also specifically targeted, e.g., to direct the RNAi agent to particular cell types.

[0557] A liposome containing an RNAi agent can be prepared by a variety of methods. In one example, the lipid component of a liposome is dissolved in a detergent so that micelles are formed with the lipid component. For example, the lipid component can be an amphipathic cationic lipid or lipid conjugate. The detergent can have a high critical micelle concentration and may be nonionic. Exemplary detergents include cholate, CHAPS, octylglucoside, deoxycholate, and lauroyl sarcosine. The RNAi agent preparation is then added to the micelles that include the lipid component. The cationic groups on the lipid interact with the RNAi agent and condense around the RNAi agent to form a liposome. After condensation, the detergent is removed, e.g., by dialysis, to yield a liposomal preparation of RNAi agent.

[0558] If necessary a carrier compound that assists in condensation can be added during the condensation reaction, e.g., by controlled addition. For example, the carrier compound can be a polymer other than a nucleic acid (e.g., spermine or spermidine). pH can also adjusted to favor condensation.

[0559] Methods for producing stable polynucleotide delivery vehicles, which incorporate a polynucleotide/cationic lipid complex as structural components of the delivery vehicle, are further described in, e.g., WO 96/37194, the entire contents of which are incorporated herein by reference. Liposome formation can also include one or more aspects of exemplary methods described in Felgner, P. L. et al., (1987) Proc. Natl. Acad. Sci. USA 8:7413-7417; U.S. Pat. Nos. 4,897,355; 5,171,678; Bangham et al., (1965) M. Mol. Biol. 23:238; Olson et al., (1979) Biochim. Biophys. Acta 557:9; Szoka et al., (1978) Proc. Natl. Acad. Sci. 75: 4194; Mayhew et al., (1984) Biochim. Biophys. Acta 775:169; Kim et al., (1983) Biochim. Biophys. Acta 728:339; and Fukunaga et al., (1984) Endocrinol. 115:757. Commonly used techniques for preparing lipid aggregates of appropriate size for use as delivery vehicles include sonication and freeze-thaw plus extrusion (see, e.g., Mayer et al., (1986) Biochim. Biophys. Acta 858:161. Microfluidization can be used when consistently small (50 to 200 nm) and relatively uniform aggregates are desired (Mayhew et al., (1984) Biochim. Biophys. Acta 775:169. These methods are readily adapted to packaging RNAi agent preparations into liposomes.

[0560] Liposomes fall into two broad classes. Cationic liposomes are positively charged liposomes which interact with the negatively charged nucleic acid molecules to form a stable complex. The positively charged nucleic acid/liposome complex binds to the negatively charged cell surface and is internalized in an endosome. Due to the acidic pH within the endosome, the liposomes are ruptured, releasing their contents into the cell cytoplasm (Wang et al. (1987) Biochem. Biophys. Res. Commun., 147:980-985).

[0561] Liposomes, which are pH-sensitive or negatively charged, entrap nucleic acids rather than complex with them. Since both the nucleic acid and the lipid are similarly charged, repulsion rather than complex formation occurs. Nevertheless, some nucleic acid is entrapped within the aqueous interior of these liposomes. pH sensitive liposomes have been used to deliver nucleic acids encoding the thymidine kinase gene to cell monolayers in culture. Expression of the exogenous gene was detected in the target cells (Zhou et al. (1992) Journal of Controlled Release, 19:269-274).

[0562] One major type of liposomal composition includes phospholipids other than naturally-derived phosphatidylcholine. Neutral liposome compositions, for example, can be formed from dimyristoyl phosphatidylcholine (DMPC) or dipalmitoyl phosphatidylcholine (DPPC). Anionic liposome compositions generally are formed from dimyristoyl phosphatidylglycerol, while anionic fusogenic liposomes are formed primarily from dioleoyl phosphatidylethanolamine (DOPE). Another type of liposomal composition is formed from phosphatidylcholine (PC) such as, for example, soybean PC, and egg PC. Another type is formed from mixtures of phospholipid or phosphatidylcholine or cholesterol.

[0563] Examples of other methods to introduce liposomes into cells in vitro and in vivo include U.S. Pat. Nos. 5,283,185; 5,171,678; WO 94/00569; WO 93/24640; WO 91/16024; Felgner, (1994) J. Biol. Chem. 269:2550; Nabel, (1993) Proc. Natl. Acad. Sci. 90:11307; Nabel, (1992) Human Gene Ther. 3:649; Gershon, (1993) Biochem. 32:7143; and Strauss, (1992) EMBO J. 11:417.

[0564] Non-ionic liposomal systems have also been examined to determine their utility in the delivery of drugs to the skin, in particular systems comprising non-ionic surfactant and cholesterol. Non-ionic liposomal formulations comprising Novasome™ I (glyceryl dilaurate/cholesterol/polyoxyethylene-10-stearyl ether) and Novasome™ II (glyceryl distearate/cholesterol/polyoxyethylene-10-stearyl ether) were used to deliver cyclosporin-A into the dermis of mouse skin. Results indicated that such non-ionic liposomal systems were effective in facilitating the deposition of cyclosporine A into different layers of the skin (Hu et al., (1994) S.T.P. Pharma. Sci., 4(6):466).

[0565] Liposomes also include “sterically stabilized” liposomes, a term which, as used herein, refers to liposomes comprising one or more specialized lipids that, when incorporated into liposomes, result in enhanced circulation lifetimes relative to liposomes lacking such specialized lipids. Examples of sterically stabilized liposomes are those in which part of the vesicle-forming lipid portion of the liposome (A) comprises one or more glycolipids, such as monosialoganglioside G_{MI}, or (B) is derivatized with one or more hydrophilic polymers, such as a polyethylene glycol (PEG) moiety. While not wishing to be bound by any particular theory, it is thought in the art that, at least for sterically stabilized liposomes containing gangliosides, sphingomyelin, or PEG-derivatized lipids, the enhanced circulation half-life of these sterically stabilized liposomes derives from a reduced uptake into cells of the reticuloendothelial system (RES) (Allen et al., (1987) FEBS Letters, 223:42; Wu et al., (1993) Cancer Research, 53:3765).

[0566] Various liposomes comprising one or more glycolipids are known in the art. Papahadjopoulos et al. (Ann. N. Y. Acad. Sci., (1987), 507:64) reported the ability of monosialoganglioside G_{MI}, galactocerebroside sulfate and phosphatidylinositol to improve blood half-lives of liposomes. These findings were expounded upon by Gabizon et al. (Proc. Natl. Acad. Sci. U.S.A., (1988), 85:6949). U.S. Pat. No. 4,837,028 and WO 88/04924, both to Allen et al., disclose liposomes comprising (1) sphingomyelin and (2) the ganglioside G_{M}i or a galactocerebroside sulfate ester. U.S. Pat. No. 5,543,152 (Webb et al.) discloses liposomes comprising sphingomyelin. Liposomes comprising 1,2-sn-dimyristoylphosphatidylcholine are disclosed in WO 97/13499 (Lim et al).

[0567] In one embodiment, cationic liposomes are used. Cationic liposomes possess the advantage of being able to fuse to the cell membrane. Non-cationic liposomes, although not able to fuse as efficiently with the plasma membrane, are taken up by macrophages in vivo and can be used to deliver RNAi agents to macrophages.

[0568] Further advantages of liposomes include: liposomes obtained from natural phospholipids are biocompatible and biodegradable; liposomes can incorporate a wide range of water and lipid soluble drugs; liposomes can protect encapsulated RNAi agents in their internal compartments from metabolism and degradation (Rosoff, in “Pharmaceutical Dosage Forms,” Lieberman, Rieger and Banker (Eds.), 1988, volume 1, p. 245). Important considerations in the preparation of liposome formulations are the lipid surface charge, vesicle size and the aqueous volume of the liposomes.

[0569] A positively charged synthetic cationic lipid, N-[1-(2,3-dioleyloxy)propyl]-N,N,N-trimethylammonium chloride (DOTMA) can be used to form small liposomes that interact spontaneously with nucleic acid to form lipid-nucleic acid complexes which are capable of fusing with the negatively charged lipids of the cell membranes of tissue culture cells, resulting in delivery of RNAi agent (see, e.g., Felgner, P. L. et al., (1987) Proc. Natl. Acad. Sci. USA 8:7413-7417, and U.S. Pat. No. 4,897,355 for a description of DOTMA and its use with DNA).

[0570] A DOTMA analogue, 1,2-bis(oleoyloxy)-3-(trimethylammonia)propane (DOTAP) can be used in combination with a phospholipid to form DNA-complexing vesicles. Lipofectin™ Bethesda Research Laboratories, Gaithersburg, Md.) is an effective agent for the delivery of highly anionic nucleic acids into living tissue culture cells that comprise positively charged DOTMA liposomes which interact spontaneously with negatively charged polynucleotides to form complexes. When enough positively charged liposomes are used, the net charge on the resulting complexes is also positive. Positively charged complexes prepared in this way spontaneously attach to negatively charged cell surfaces, fuse with the plasma membrane, and efficiently deliver functional nucleic acids into, for example, tissue culture cells. Another commercially available cationic lipid, 1,2-bis(oleoyloxy)-3,3-(trimethylammonia)propane (“DOTAP”) (Boehringer Mannheim, Indianapolis, Indiana) differs from DOTMA in that the oleoyl moieties are linked by ester, rather than ether linkages.

[0571] Other reported cationic lipid compounds include those that have been conjugated to a variety of moieties including, for example, carboxyspermine which has been conjugated to one of two types of lipids and includes compounds such as 5-carboxyspermylglycine dioctaoleoylamide (“DOGS”) (Transfectam™, Promega, Madison, Wisconsin) and dipalmitoylphosphatidylethanolamine 5-carboxyspermyl-amide (“DPPES”) (see, e.g., U.S. Pat. No. 5,171,678).

[0572] Another cationic lipid conjugate includes derivatization of the lipid with cholesterol (“DC-Chol”) which has been formulated into liposomes in combination with DOPE (See, Gao, X. and Huang, L., (1991) Biochim. Biophys. Res. Commun. 179:280). Lipopolylysine, made by conjugating polylysine to DOPE, has been reported to be effective for transfection in the presence of serum (Zhou, X. et al., (1991) Biochim. Biophys. Acta 1065:8). For certain cell lines, these liposomes containing conjugated cationic lipids, are said to exhibit lower toxicity and provide more efficient transfection than the DOTMA-containing compositions. Other commercially available cationic lipid products include DMRIE and DMRIE-HP (Vical, La Jolla, California) and Lipofectamine (DOSPA) (Life Technology, Inc., Gaithersburg, Maryland). Other cationic lipids suitable for the delivery of oligonucleotides are described in WO 98/39359 and WO 96/37194.

[0573] Liposomal formulations are particularly suited for topical administration, liposomes present several advantages over other formulations. Such advantages include reduced side effects related to high systemic absorption of the administered drug, increased accumulation of the administered drug at the desired target, and the ability to administer RNAi agent into the skin. In some implementations, liposomes are used for delivering RNAi agent to epidermal cells and also to enhance the penetration of RNAi agent into dermal tissues, e.g., into skin. For example, the liposomes can be applied topically. Topical delivery of drugs formulated as liposomes to the skin has been documented (see, e.g., Weiner et al., (1992) Journal of Drug Targeting, vol. 2, 405-410 and du Plessis et al., (1992) Antiviral Research, 18:259-265; Mannino, R. J. and Fould-Fogerite, S., (1998) Biotechniques 6:682-690; Itani, T. et al., (1987) Gene 56:267-276; Nicolau, C. et al. (1987) Meth. Enzymol. 149:157-176; Straubinger, R. M. and Papahadjopoulos, D. (1983) Meth. Enzymol. 101:512-527; Wang, C. Y. and Huang, L., (1987) Proc. Natl. Acad. Sci. USA 84:7851-7855).

[0574] Non-ionic liposomal systems have also been examined to determine their utility in the delivery of drugs to the skin, in particular systems comprising non-ionic surfactant and cholesterol. Non-ionic liposomal formulations comprising Novasome I (glyceryl dilaurate/cholesterol/polyoxyethylene-10-stearyl ether) and Novasome II (glyceryl distearate/cholesterol/polyoxyethylene-10-stearyl ether) were used to deliver a drug into the dermis of mouse skin. Such formulations with RNAi agent are useful for treating a dermatological disorder.

[0575] Liposomes that include RNAi agents can be made highly deformable. Such deformability can enable the liposomes to penetrate through pore that are smaller than the average radius of the liposome. For example, transfersomes are a type of deformable liposomes. Transferosomes can be made by adding surface edge activators, usually surfactants, to a standard liposomal composition. Transfersomes that include RNAi agent can be delivered, for example, subcutaneously by infection in order to deliver RNAi agent to keratinocytes in the skin. In order to cross intact mammalian skin, lipid vesicles must pass through a series of fine pores, each with a diameter less than 50 nm, under the influence of a suitable transdermal gradient. In addition, due to the lipid properties, these transferosomes can be self-optimizing (adaptive to the shape of pores, e.g., in the skin), self-repairing, and can frequently reach their targets without fragmenting, and often self-loading.

[0576] Other formulations amenable to the present disclosure are described in U.S. provisional application Ser. No. 61/018,616, filed Jan. 2, 2008; 61/018,611, filed Jan. 2, 2008; 61/039,748, filed Mar. 26, 2008; 61/047,087, filed Apr. 22, 2008 and 61/051,528, filed May 8, 2008. PCT application number PCT/US2007/080331, filed Oct. 3, 2007, also describes formulations that are amenable to the present disclosure.

[0577] Transfersomes, yet another type of liposomes, are highly deformable lipid aggregates which are attractive candidates for drug delivery vehicles. Transfersomes can be described as lipid droplets which are so highly deformable that they are easily able to penetrate through pores which are smaller than the droplet. Transfersomes are adaptable to the environment in which they are used, e.g., they are self-optimizing (adaptive to the shape of pores in the skin), self-repairing, frequently reach their targets without fragmenting, and often self-loading. To make transfersomes it is possible to add surface edge-activators, usually surfactants, to a standard liposomal composition. Transfersomes have been used to deliver serum albumin to the skin. The transfersome-mediated delivery of serum albumin has been shown to be as effective as subcutaneous injection of a solution containing serum albumin.

[0578] Surfactants find wide application in formulations such as those described herein, particularly in emulsions (including microemulsions) and liposomes. The most common way of classifying and ranking the properties of the many different types of surfactants, both natural and synthetic, is by the use of the hydrophile/lipophile balance (HLB). The nature of the hydrophilic group (also known as the “head”) provides the most useful means for categorizing the different surfactants used in formulations (Rieger, in Pharmaceutical Dosage Forms, Marcel Dekker, Inc., New York, N.Y., 1988, p. 285).

[0579] If the surfactant molecule is not ionized, it is classified as a nonionic surfactant. Nonionic surfactants find wide application in pharmaceutical and cosmetic products and are usable over a wide range of pH values. In general, their HLB values range from 2 to about 18 depending on their structure. Nonionic surfactants include nonionic esters such as ethylene glycol esters, propylene glycol esters, glyceryl esters, polyglyceryl esters, sorbitan esters, sucrose esters, and ethoxylated esters. Nonionic alkanolamides and ethers such as fatty alcohol ethoxylates, propoxylated alcohols, and ethoxylated/propoxylated block polymers are also included in this class. The polyoxyethylene surfactants are the most popular members of the nonionic surfactant class.

[0580] If the surfactant molecule carries a negative charge when it is dissolved or dispersed in water, the surfactant is classified as anionic. Anionic surfactants include carboxylates such as soaps, acyl lactylates, acyl amides of amino acids, esters of sulfuric acid such as alkyl sulfates and ethoxylated alkyl sulfates, sulfonates such as alkyl benzene sulfonates, acyl isethionates, acyl taurates and sulfosuccinates, and phosphates. The most important members of the anionic surfactant class are the alkyl sulfates and the soaps.

[0581] If the surfactant molecule carries a positive charge when it is dissolved or dispersed in water, the surfactant is classified as cationic. Cationic surfactants include quaternary ammonium salts and ethoxylated amines. The quaternary ammonium salts are the most used members of this class.

[0582] If the surfactant molecule has the ability to carry either a positive or negative charge, the surfactant is classified as amphoteric. Amphoteric surfactants include acrylic acid derivatives, substituted alkylamides, N-alkylbetaines and phosphatides.

[0583] The use of surfactants in drug products, formulations and in emulsions has been reviewed (Rieger, in Pharmaceutical Dosage Forms, Marcel Dekker, Inc., New York, N.Y., 1988, p. 285).

[0584] The RNAi agent for use in the methods of the disclosure can also be provided as micellar formulations. “Micelles” are defined herein as a particular type of molecular assembly in which amphipathic molecules are arranged in a spherical structure such that all the hydrophobic portions of the molecules are directed inward, leaving the hydrophilic portions in contact with the surrounding aqueous phase. The converse arrangement exists if the environment is hydrophobic.

[0585] A mixed micellar formulation suitable for delivery through transdermal membranes may be prepared by mixing an aqueous solution of the siRNA composition, an alkali metal C₈ to C₂₂ alkyl sulphate, and a micelle forming compounds. Exemplary micelle forming compounds include lecithin, hyaluronic acid, pharmaceutically acceptable salts of hyaluronic acid, glycolic acid, lactic acid, chamomile extract, cucumber extract, oleic acid, linoleic acid, linolenic acid, monoolein, monooleates, monolaurates, borage oil, evening of primrose oil, menthol, trihydroxy oxo cholanyl glycine and pharmaceutically acceptable salts thereof, glycerin, polyglycerin, lysine, polylysine, triolein, polyoxyethylene ethers and analogues thereof, polidocanol alkyl ethers and analogues thereof, chenodeoxycholate, deoxycholate, and mixtures thereof. The micelle forming compounds may be added at the same time or after addition of the alkali metal alkyl sulphate. Mixed micelles will form with substantially any kind of mixing of the ingredients but vigorous mixing in order to provide smaller size micelles.

[0586] In one method a first micellar composition is prepared which contains the siRNA composition and at least the alkali metal alkyl sulphate. The first micellar composition is then mixed with at least three micelle forming compounds to form a mixed micellar composition. In another method, the micellar composition is prepared by mixing the siRNA composition, the alkali metal alkyl sulphate and at least one of the micelle forming compounds, followed by addition of the remaining micelle forming compounds, with vigorous mixing.

[0587] Phenol or m-cresol may be added to the mixed micellar composition to stabilize the formulation and protect against bacterial growth. Alternatively, phenol or m-cresol may be added with the micelle forming ingredients. An isotonic agent such as glycerin may also be added after formation of the mixed micellar composition.

[0588] For delivery of the micellar formulation as a spray, the formulation can be put into an aerosol dispenser and the dispenser is charged with a propellant. The propellant, which is under pressure, is in liquid form in the dispenser. The ratios of the ingredients are adjusted so that the aqueous and propellant phases become one, i.e., there is one phase. If there are two phases, it is necessary to shake the dispenser prior to dispensing a portion of the contents, e.g., through a metered valve. The dispensed dose of pharmaceutical agent is propelled from the metered valve in a fine spray.

[0589] Propellants may include hydrogen-containing chlorofluorocarbons, hydrogen-containing fluorocarbons, dimethyl ether and diethyl ether. In certain embodiments, HFA 134a (1,1,1,2 tetrafluoroethane) may be used.

[0590] The specific concentrations of the essential ingredients can be determined by relatively straightforward experimentation. For absorption through the oral cavities, it is often desirable to increase, e.g., at least double or triple, the dosage for through injection or administration through the gastrointestinal tract.

### B. Lipid Particles

[0591] RNAi agents, e.g., dsRNAs of in the disclosure may be fully encapsulated in a lipid formulation, e.g., a LNP, or other nucleic acid-lipid particle.

[0592] As used herein, the term “LNP” refers to a stable nucleic acid-lipid particle. LNPs typically contain a cationic lipid, a non-cationic lipid, and a lipid that prevents aggregation of the particle (e.g., a PEG-lipid conjugate). LNPs are extremely useful for systemic applications, as they exhibit extended circulation lifetimes following intravenous (i.v.) injection and accumulate at distal sites (e.g., sites physically separated from the administration site). LNPs include “pSPLP,” which include an encapsulated condensing agent-nucleic acid complex as set forth in WO 00/03683. The particles of the present disclosure typically have a mean diameter of about 50 nm to about 150 nm, more typically about 60 nm to about 130 nm, more typically about 70 nm to about 110 nm, most typically about 70 nm to about 90 nm, and are substantially nontoxic. In addition, the nucleic acids when present in the nucleic acid-lipid particles of the present disclosure are resistant in aqueous solution to degradation with a nuclease. Nucleic acid-lipid particles and their method of preparation are disclosed in, e.g., U.S. Pat. Nos. 5,976,567; 5,981,501; 6,534,484; 6,586,410; 6,815,432; United States Patent publication No. 2010/0324120 and WO 96/40964.

[0593] In one embodiment, the lipid to drug ratio (mass/mass ratio) (e.g., lipid to dsRNA ratio) will be in the range of from about 1:1 to about 50:1, from about 1:1 to about 25:1, from about 3:1 to about 15:1, from about 4:1 to about 10:1, from about 5:1 to about 9:1, or about 6:1 to about 9:1. Ranges intermediate to the above recited ranges are also contemplated to be part of the disclosure.

[0594] Certain specific LNP formulations for delivery of RNAi agents have been described in the art, including, e.g., “LNPO1” formulations as described in, e.g., WO 2008/042973, which is hereby incorporated by reference.

| | | cationic lipid/non-cationic |
|---|---|---|
| | | lipid/cholesterol/PEG-lipid conjugate |
| | Ionizable/Cationic Lipid | Lipid:siRNA ratio |
| SNALP-1 | 1,2-Dilinolenyloxy-N,N- | DLinDMA/DPPC/Cholesterol/PEG- |
| | dimethylaminopropane (DLinDMA) | cDMA |
| | | (57.1/7.1/34.4/1.4) |
| | | lipid:siRNA ~7:1 |
| 2-XTC | 2,2-Dilinoleyl-4-dimethylaminoethyl-[1,3]- | XTC/DPPC/Cholesterol/PEG-cDMA |
| | dioxolane (XTC) | 57.1/7.1/34.4/1.4 |
| | | lipid:siRNA ~7:1 |
| LNP05 | 2,2-Dilinoleyl-4-dimethylaminoethyl-[1,3]- | XTC/DSPC/Cholesterol/PEG-DMG |
| | dioxolane (XTC) | 57.5/7.5/31.5/3.5 |
| | | lipid:siRNA ~6:1 |
| LNP06 | 2,2-Dilinoleyl-4-dimethylaminoethyl-[1,3]- | XTC/DSPC/Cholesterol/PEG-DMG |
| | dioxolane (XTC) | 57.5/7.5/31.5/3.5 |
| | | lipid:siRNA ~11:1 |
| LNP07 | 2,2-Dilinoleyl-4-dimethylaminoethyl-[1,3]- | XTC/DSPC/Cholesterol/PEG-DMG |
| | dioxolane (XTC) | 60/7.5/31/1.5, |
| | | lipid:siRNA ~6:1 |
| LNP08 | 2,2-Dilinoleyl-4-dimethylaminoethyl-[1,3]- | XTC/DSPC/Cholesterol/PEG-DMG |
| | dioxolane (XTC) | 60/7.5/31/1.5, |
| | | lipid:siRNA ~11:1 |
| LNP09 | 2,2-Dilinoleyl-4-dimethylaminoethyl-[1,3]- | XTC/DSPC/Cholesterol/PEG-DMG |
| | dioxolane (XTC) | 50/10/38.5/1.5 |
| | | Lipid:siRNA 10:1 |
| LNP10 | (3aR,5s,6aS)-N,N-dimethyl-2,2- | ALN100/DSPC/Cholesterol/PEG- |
| | di((9Z,12Z)-octadeca-9,12- | DMG |
| | dienyl)tetrahydro-3aH- | 50/10/38.5/1.5 |
| | cyclopenta[d][1,3]dioxol-5-amine | Lipid:siRNA 10:1 |
| | (ALN100) | |
| LNP11 | (6Z,9Z,28Z,31Z)-heptatriaconta-6,9,28,31- | MC-3/DSPC/Cholesterol/PEG-DMG |
| | tetraen-19-yl 4-(dimethylamino)butanoate | 50/10/38.5/1.5 |
| | (MC3) | Lipid:siRNA 10:1 |
| LNP12 | 1,1′-(2-(4-(2-((2-(bis(2- | Tech G1/DSPC/Cholesterol/PEG- |
| | hydroxydodecyl)amino)ethyl)(2- | DMG |
| | hydroxydodecyl)amino)ethyl)piperazin-1- | 50/10/38.5/1.5 |
| | yl)ethylazanediyl)didodecan-2-ol (Tech | Lipid:siRNA 10:1 |
| | G1) | |
| LNP13 | XTC | XTC/DSPC/Chol/PEG-DMG |
| | | 50/10/38.5/1.5 |
| | | Lipid:siRNA: 33:1 |
| LNP14 | MC3 | MC3/DSPC/Chol/PEG-DMG |
| | | 40/15/40/5 |
| | | Lipid:siRNA: 11:1 |
| LNP15 | MC3 | MC3/DSPC/Chol/PEG-DSG/GalNAc- |
| | | PEG-DSG |
| | | 50/10/35/4.5/0.5 |
| | | Lipid:siRNA: 11:1 |
| LNP16 | MC3 | MC3/DSPC/Chol/PEG-DMG |
| | | 50/10/38.5/1.5 |
| | | Lipid:siRNA: 7:1 |
| LNP17 | MC3 | MC3/DSPC/Chol/PEG-DSG |
| | | 50/10/38.5/1.5 |
| | | Lipid:siRNA: 10:1 |
| LNP18 | MC3 | MC3/DSPC/Chol/PEG-DMG |
| | | 50/10/38.5/1.5 |
| | | Lipid:siRNA: 12:1 |
| LNP19 | MC3 | MC3/DSPC/Chol/PEG-DMG |
| | | 50/10/35/5 |
| | | Lipid:siRNA: 8:1 |
| LNP20 | MC3 | MC3/DSPC/Chol/PEG-DPG |
| | | 50/10/38.5/1.5 |
| | | Lipid:siRNA: 10:1 |
| LNP21 | C12-200 | C12-200/DSPC/Chol/PEG-DSG |
| | | 50/10/38.5/1.5 |
| | | Lipid:siRNA: 7:1 |
| LNP22 | XTC | XTC/DSPC/Chol/PEG-DSG |
| | | 50/10/38.5/1.5 |
| | | Lipid:siRNA: 10:1 |

DSPC: distearoylphosphatidylcholine
DPPC: dipalmitoylphosphatidylcholine
PEG-DMG: PEG-didimyristoyl glycerol (C14-PEG, or PEG-C14) (PEG with avg mol wt of 2000)
PEG-DSG: PEG-distyryl glycerol (C18-PEG, or PEG-C18) (PEG with avg mol wt of 2000)
PEG-cDMA: PEG-carbamoyl-1,2-dimyristyloxypropylamine (PEG with avg mol wt of 2000)

[0595] SNALP (1,2-Dilinolenyloxy-N,N-dimethylaminopropane (DLinDMA)) comprising formulations are described in WO 2009/127060, which is hereby incorporated by reference.

[0596] XTC comprising formulations are described in WO 2010/088537, the entire contents of which are hereby incorporated herein by reference.

[0597] MC3 comprising formulations are described, e.g., in United States Patent Publication No. 2010/0324120, the entire contents of which are hereby incorporated by reference.

[0598] ALNY-100 comprising formulations are described in WO 2010/054406, the entire contents of which are hereby incorporated herein by reference.

[0599] C12-200 comprising formulations are described in WO 2010/129709, the entire contents of which are hereby incorporated herein by reference.

[0600] Compositions and formulations for oral administration include powders or granules, microparticulates, nanoparticulates, suspensions or solutions in water or non-aqueous media, capsules, gel capsules, sachets, tablets or minitablets. Thickeners, flavoring agents, diluents, emulsifiers, dispersing aids or binders can be desirable. In some embodiments, oral formulations are those in which dsRNAs featured in the disclosure are administered in conjunction with one or more penetration enhancer surfactants and chelators. Suitable surfactants include fatty acids or esters or salts thereof, bile acids or salts thereof. Suitable bile acids/salts include chenodeoxycholic acid (CDCA) and ursodeoxychenodeoxycholic acid (UDCA), cholic acid, dehydrocholic acid, deoxycholic acid, glucholic acid, glycholic acid, glycodeoxycholic acid, taurocholic acid, taurodeoxycholic acid, sodium tauro-24,25-dihydro-fusidate and sodium glycodihydrofusidate. Suitable fatty acids include arachidonic acid, undecanoic acid, oleic acid, lauric acid, caprylic acid, capric acid, myristic acid, palmitic acid, stearic acid, linoleic acid, linolenic acid, dicaprate, tricaprate, monoolein, dilaurin, glyceryl 1-monocaprate, 1-dodecylazacycloheptan-2-one, an acylcarnitine, an acylcholine, or a monoglyceride, a diglyceride or a pharmaceutically acceptable salt thereof (e.g., sodium). In some embodiments, combinations of penetration enhancers are used, for example, fatty acids/salts in combination with bile acids/salts. One exemplary combination is the sodium salt of lauric acid, capric acid and UDCA. Further penetration enhancers include polyoxyethylene-9-lauryl ether, polyoxyethylene-20-cetyl ether. DsRNAs featured in the disclosure can be delivered orally, in granular form including sprayed dried particles, or complexed to form micro or nanoparticles. DsRNA complexing agents include poly-amino acids; polyimines; polyacrylates; polyalkylacrylates, polyoxethanes, polyalkylcyanoacrylates; cationized gelatins, albumins, starches, acrylates, polyethyleneglycols (PEG) and starches; polyalkylcyanoacrylates; DEAE-derivatized polyimines, pollulans, celluloses and starches. Suitable complexing agents include chitosan, N-trimethylchitosan, poly-L-lysine, polyhistidine, polyornithine, polyspermines, protamine, polyvinylpyridine, polythiodiethylaminomethylethylene P(TDAE), polyaminostyrene (e.g., p-amino), poly(methylcyanoacrylate), poly(ethylcyanoacrylate), poly(butylcyanoacrylate), poly(isobutylcyanoacrylate), poly(isohexylcynaoacrylate), DEAE-methacrylate, DEAE-hexylacrylate, DEAE-acrylamide, DEAE-albumin and DEAE-dextran, polymethylacrylate, polyhexylacrylate, poly(D,L-lactic acid), poly(DL-lactic-co-glycolic acid (PLGA), alginate, and polyethyleneglycol (PEG). Oral formulations for dsRNAs and their preparation are described in detail in U.S. Pat. No. 6,887,906, U.S. 2003/0027780, and U.S. Pat. No. 6,747,014, each of which is incorporated herein by reference.

[0601] Compositions and formulations for parenteral, intraparenchymal (into the brain), intrathecal, intraventricular or intrahepatic administration can include sterile aqueous solutions which can also contain buffers, diluents and other suitable additives such as, but not limited to, penetration enhancers, carrier compounds and other pharmaceutically acceptable carriers or excipients.

[0602] Pharmaceutical compositions of the present disclosure include, but are not limited to, solutions, emulsions, and liposome-containing formulations. These compositions can be generated from a variety of components that include, but are not limited to, preformed liquids, self-emulsifying solids and self-emulsifying semisolids. Particularly preferred are formulations that target the brain when treating HTT-associated diseases or disorders.

[0603] The pharmaceutical formulations of the present disclosure, which can conveniently be presented in unit dosage form, can be prepared according to conventional techniques well known in the pharmaceutical industry. Such techniques include the step of bringing into association the active ingredients with the pharmaceutical carrier(s) or excipient(s). In general, the formulations are prepared by uniformly and intimately bringing into association the active ingredients with liquid carriers or finely divided solid carriers or both, and then, if necessary, shaping the product.

[0604] The compositions of the present disclosure can be formulated into any of many possible dosage forms such as, but not limited to, tablets, capsules, gel capsules, liquid syrups, soft gels, suppositories, and enemas. The compositions of the present disclosure can also be formulated as suspensions in aqueous, non-aqueous or mixed media. Aqueous suspensions can further contain substances which increase the viscosity of the suspension including, for example, sodium carboxymethylcellulose, sorbitol or dextran. The suspension can also contain stabilizers.

### C. Additional Formulations

i. Emulsions

[0605] The compositions of the present disclosure can be prepared and formulated as emulsions. Emulsions are typically heterogeneous systems of one liquid dispersed in another in the form of droplets usually exceeding 0.1 m in diameter (see e.g., Ansel's Pharmaceutical Dosage Forms and Drug Delivery Systems, Allen, LV., Popovich N G., and Ansel H C., 2004, Lippincott Williams & Wilkins (8th ed.), New York, NY; Idson, in Pharmaceutical Dosage Forms, Lieberman, Rieger and Banker (Eds.), 1988, Marcel Dekker, Inc., New York, N.Y., volume 1, p. 199; Rosoff, in Pharmaceutical Dosage Forms, Lieberman, Rieger and Banker (Eds.), 1988, Marcel Dekker, Inc., New York, N.Y., Volume 1, p. 245; Block in Pharmaceutical Dosage Forms, Lieberman, Rieger and Banker (Eds.), 1988, Marcel Dekker, Inc., New York, N.Y., volume 2, p. 335; Higuchi et al., in Remington's Pharmaceutical Sciences, Mack Publishing Co., Easton, Pa., 1985, p. 301). Emulsions are often biphasic systems comprising two immiscible liquid phases intimately mixed and dispersed with each other. In general, emulsions can be of either the water-in-oil (w/o) or the oil-in-water (o/w) variety. When an aqueous phase is finely divided into and dispersed as minute droplets into a bulk oily phase, the resulting composition is called a water-in-oil (w/o) emulsion. Alternatively, when an oily phase is finely divided into and dispersed as minute droplets into a bulk aqueous phase, the resulting composition is called an oil-in-water (o/w) emulsion. Emulsions can contain additional components in addition to the dispersed phases, and the active drug which can be present as a solution in either aqueous phase, oily phase or itself as a separate phase. Pharmaceutical excipients such as emulsifiers, stabilizers, dyes, and anti-oxidants can also be present in emulsions as needed. Pharmaceutical emulsions can also be multiple emulsions that are comprised of more than two phases such as, for example, in the case of oil-in-water-in-oil (o/w/o) and water-in-oil-in-water (w/o/w) emulsions. Such complex formulations often provide certain advantages that simple binary emulsions do not. Multiple emulsions in which individual oil droplets of an o/w emulsion enclose small water droplets constitute a w/o/w emulsion. Likewise, a system of oil droplets enclosed in globules of water stabilized in an oily continuous phase provides an o/w/o emulsion.

[0606] Emulsions are characterized by little or no thermodynamic stability. Often, the dispersed or discontinuous phase of the emulsion is well dispersed into the external or continuous phase and maintained in this form through the means of emulsifiers or the viscosity of the formulation. Either of the phases of the emulsion can be a semisolid or a solid, as is the case of emulsion-style ointment bases and creams. Other means of stabilizing emulsions entail the use of emulsifiers that can be incorporated into either phase of the emulsion. Emulsifiers can broadly be classified into four categories: synthetic surfactants, naturally occurring emulsifiers, absorption bases, and finely dispersed solids (see e.g., Ansel's Pharmaceutical Dosage Forms and Drug Delivery Systems, Allen, LV., Popovich N G., and Ansel H C., 2004, Lippincott Williams & Wilkins (8th ed.), New York, NY; Idson, in Pharmaceutical Dosage Forms, Lieberman, Rieger and Banker (Eds.), 1988, Marcel Dekker, Inc., New York, N.Y., volume 1, p. 199).

[0607] Synthetic surfactants, also known as surface active agents, have found wide applicability in the formulation of emulsions and have been reviewed in the literature (see e.g., Ansel's Pharmaceutical Dosage Forms and Drug Delivery Systems, Allen, LV., Popovich N G., and Ansel H C., 2004, Lippincott Williams & Wilkins (8th ed.), New York, NY; Rieger, in Pharmaceutical Dosage Forms, Lieberman, Rieger and Banker (Eds.), 1988, Marcel Dekker, Inc., New York, N.Y., volume 1, p. 285; Idson, in Pharmaceutical Dosage Forms, Lieberman, Rieger and Banker (Eds.), Marcel Dekker, Inc., New York, N.Y., 1988, volume 1, p. 199). Surfactants are typically amphiphilic and comprise a hydrophilic and a hydrophobic portion. The ratio of the hydrophilic to the hydrophobic nature of the surfactant has been termed the hydrophile/lipophile balance (HLB) and is a valuable tool in categorizing and selecting surfactants in the preparation of formulations. Surfactants can be classified into different classes based on the nature of the hydrophilic group: nonionic, anionic, cationic and amphoteric (see e.g., Ansel's Pharmaceutical Dosage Forms and Drug Delivery Systems, Allen, LV., Popovich N G., and Ansel H C., 2004, Lippincott Williams & Wilkins (8th ed.), New York, NY Rieger, in Pharmaceutical Dosage Forms, Lieberman, Rieger and Banker (Eds.), 1988, Marcel Dekker, Inc., New York, N.Y., volume 1, p. 285).

[0608] Naturally occurring emulsifiers used in emulsion formulations include lanolin, beeswax, phosphatides, lecithin and acacia. Absorption bases possess hydrophilic properties such that they can soak up water to form w/o emulsions yet retain their semisolid consistencies, such as anhydrous lanolin and hydrophilic petrolatum. Finely divided solids have also been used as good emulsifiers especially in combination with surfactants and in viscous preparations. These include polar inorganic solids, such as heavy metal hydroxides, nonswelling clays such as bentonite, attapulgite, hectorite, kaolin, montmorillonite, colloidal aluminum silicate and colloidal magnesium aluminum silicate, pigments and nonpolar solids such as carbon or glyceryl tristearate.

[0609] A large variety of non-emulsifying materials are also included in emulsion formulations and contribute to the properties of emulsions. These include fats, oils, waxes, fatty acids, fatty alcohols, fatty esters, humectants, hydrophilic colloids, preservatives and antioxidants (Block, in Pharmaceutical Dosage Forms, Lieberman, Rieger and Banker (Eds.), 1988, Marcel Dekker, Inc., New York, N.Y., volume 1, p. 335; Idson, in Pharmaceutical Dosage Forms, Lieberman, Rieger and Banker (Eds.), 1988, Marcel Dekker, Inc., New York, N.Y., volume 1, p. 199).

[0610] Hydrophilic colloids or hydrocolloids include naturally occurring gums and synthetic polymers such as polysaccharides (for example, acacia, agar, alginic acid, carrageenan, guar gum, karaya gum, and tragacanth), cellulose derivatives (for example, carboxymethylcellulose and carboxypropylcellulose), and synthetic polymers (for example, carbomers, cellulose ethers, and carboxyvinyl polymers). These disperse or swell in water to form colloidal solutions that stabilize emulsions by forming strong interfacial films around the dispersed-phase droplets and by increasing the viscosity of the external phase.

[0611] Since emulsions often contain a number of ingredients such as carbohydrates, proteins, sterols and phosphatides that can readily support the growth of microbes, these formulations often incorporate preservatives. Commonly used preservatives included in emulsion formulations include methyl paraben, propyl paraben, quaternary ammonium salts, benzalkonium chloride, esters of p-hydroxybenzoic acid, and boric acid. Antioxidants are also commonly added to emulsion formulations to prevent deterioration of the formulation. Antioxidants used can be free radical scavengers such as tocopherols, alkyl gallates, butylated hydroxyanisole, butylated hydroxytoluene, or reducing agents such as ascorbic acid and sodium metabisulfite, and antioxidant synergists such as citric acid, tartaric acid, and lecithin.

[0612] The application of emulsion formulations via dermatological, oral and parenteral routes and methods for their manufacture have been reviewed in the literature (see e.g., Ansel's Pharmaceutical Dosage Forms and Drug Delivery Systems, Allen, LV., Popovich N G., and Ansel H C., 2004, Lippincott Williams & Wilkins (8th ed.), New York, NY; Idson, in Pharmaceutical Dosage Forms, Lieberman, Rieger and Banker (Eds.), 1988, Marcel Dekker, Inc., New York, N.Y., volume 1, p. 199). Emulsion formulations for oral delivery have been very widely used because of ease of formulation, as well as efficacy from an absorption and bioavailability standpoint (see e.g., Ansel's Pharmaceutical Dosage Forms and Drug Delivery Systems, Allen, LV., Popovich N G., and Ansel H C., 2004, Lippincott Williams & Wilkins (8th ed.), New York, NY; Rosoff, in Pharmaceutical Dosage Forms, Lieberman, Rieger and Banker (Eds.), 1988, Marcel Dekker, Inc., New York, N.Y., volume 1, p. 245; Idson, in Pharmaceutical Dosage Forms, Lieberman, Rieger and Banker (Eds.), 1988, Marcel Dekker, Inc., New York, N.Y., volume 1, p. 199). Mineral-oil base laxatives, oil-soluble vitamins and high fat nutritive preparations are among the materials that have commonly been administered orally as o/w emulsions.

ii. Microemulsions

[0613] In one embodiment of the present disclosure, the compositions of RNAi agents and nucleic acids are formulated as microemulsions. A microemulsion can be defined as a system of water, oil and amphiphile which is a single optically isotropic and thermodynamically stable liquid solution (see e.g., Ansel's Pharmaceutical Dosage Forms and Drug Delivery Systems, Allen, LV., Popovich N G., and Ansel H C., 2004, Lippincott Williams & Wilkins (8th ed.), New York, NY; Rosoff, in Pharmaceutical Dosage Forms, Lieberman, Rieger and Banker (Eds.), 1988, Marcel Dekker, Inc., New York, N.Y., volume 1, p. 245). Typically, microemulsions are systems that are prepared by first dispersing an oil in an aqueous surfactant solution and then adding a sufficient amount of a fourth component, generally an intermediate chain-length alcohol to form a transparent system. Therefore, microemulsions have also been described as thermodynamically stable, isotropically clear dispersions of two immiscible liquids that are stabilized by interfacial films of surface-active molecules (Leung and Shah, in: Controlled Release of Drugs: Polymers and Aggregate Systems, Rosoff, M., Ed., 1989, VCH Publishers, New York, pages 185-215). Microemulsions commonly are prepared via a combination of three to five components that include oil, water, surfactant, cosurfactant and electrolyte. Whether the microemulsion is of the water-in-oil (w/o) or an oil-in-water (o/w) type is dependent on the properties of the oil and surfactant used, and on the structure and geometric packing of the polar heads and hydrocarbon tails of the surfactant molecules (Schott, in Remington's Pharmaceutical Sciences, Mack Publishing Co., Easton, Pa., 1985, p. 271).

[0614] The phenomenological approach utilizing phase diagrams has been extensively studied and has yielded a comprehensive knowledge, to one skilled in the art, of how to formulate microemulsions (see e.g., Ansel's Pharmaceutical Dosage Forms and Drug Delivery Systems, Allen, LV., Popovich N G., and Ansel H C., 2004, Lippincott Williams & Wilkins (8th ed.), New York, NY; Rosoff, in Pharmaceutical Dosage Forms, Lieberman, Rieger and Banker (Eds.), 1988, Marcel Dekker, Inc., New York, N.Y., volume 1, p. 245; Block, in Pharmaceutical Dosage Forms, Lieberman, Rieger and Banker (Eds.), 1988, Marcel Dekker, Inc., New York, N.Y., volume 1, p. 335). Compared to conventional emulsions, microemulsions offer the advantage of solubilizing water-insoluble drugs in a formulation of thermodynamically stable droplets that are formed spontaneously.

[0615] Surfactants used in the preparation of microemulsions include, but are not limited to, ionic surfactants, non-ionic surfactants, Brij 96, polyoxyethylene oleyl ethers, polyglycerol fatty acid esters, tetraglycerol monolaurate (ML310), tetraglycerol monooleate (MO310), hexaglycerol monooleate (PO310), hexaglycerol pentaoleate (PO500), decaglycerol monocaprate (MCA750), decaglycerol monooleate (MO750), decaglycerol sequioleate (SO750), decaglycerol decaoleate (DAO750), alone or in combination with cosurfactants. The cosurfactant, usually a short-chain alcohol such as ethanol, 1-propanol, and 1-butanol, serves to increase the interfacial fluidity by penetrating into the surfactant film and consequently creating a disordered film because of the void space generated among surfactant molecules. Microemulsions can, however, be prepared without the use of cosurfactants and alcohol-free self-emulsifying microemulsion systems are known in the art. The aqueous phase can typically be, but is not limited to, water, an aqueous solution of the drug, glycerol, PEG300, PEG400, polyglycerols, propylene glycols, and derivatives of ethylene glycol. The oil phase can include, but is not limited to, materials such as Captex 300, Captex 355, Capmul MCM, fatty acid esters, medium chain (C8-C12) mono, di, and tri-glycerides, polyoxyethylated glyceryl fatty acid esters, fatty alcohols, polyglycolized glycerides, saturated polyglycolized C8-C10 glycerides, vegetable oils and silicone oil.

[0616] Microemulsions are particularly of interest from the standpoint of drug solubilization and the enhanced absorption of drugs. Lipid based microemulsions (both o/w and w/o) have been proposed to enhance the oral bioavailability of drugs, including peptides (see e.g., U.S. Pat. Nos. 6,191,105; 7,063,860; 7,070,802; 7,157,099; Constantinides et al., Pharmaceutical Research, 1994, 11, 1385-1390; Ritschel, Meth. Find. Exp. Clin. Pharmacol., 1993, 13, 205). Microemulsions afford advantages of improved drug solubilization, protection of drug from enzymatic hydrolysis, possible enhancement of drug absorption due to surfactant-induced alterations in membrane fluidity and permeability, ease of preparation, ease of oral administration over solid dosage forms, improved clinical potency, and decreased toxicity (see e.g., U.S. Pat. Nos. 6,191,105; 7,063,860; 7,070,802; 7,157,099; Constantinides et al., Pharmaceutical Research, 1994, 11, 1385; Ho et al., J. Pharm. Sci., 1996, 85, 138-143). Often microemulsions can form spontaneously when their components are brought together at ambient temperature. This can be particularly advantageous when formulating thermolabile drugs, peptides or RNAi agents. Microemulsions have also been effective in the transdermal delivery of active components in both cosmetic and pharmaceutical applications. It is expected that the microemulsion compositions and formulations of the present disclosure will facilitate the increased systemic absorption of RNAi agents and nucleic acids from the gastrointestinal tract, as well as improve the local cellular uptake of RNAi agents and nucleic acids.

[0617] Microemulsions of the present disclosure can also contain additional components and additives such as sorbitan monostearate (Grill 3), Labrasol, and penetration enhancers to improve the properties of the formulation and to enhance the absorption of the RNAi agents and nucleic acids of the present disclosure. Penetration enhancers used in the microemulsions of the present disclosure can be classified as belonging to one of five broad categories—surfactants, fatty acids, bile salts, chelating agents, and non-chelating non-surfactants (Lee et al., Critical Reviews in Therapeutic Drug Carrier Systems, 1991, p. 92). Each of these classes has been discussed above.

iii. Microparticles

[0618] An RNAi agent of the disclosure may be incorporated into a particle, e.g., a microparticle. Microparticles can be produced by spray-drying, but may also be produced by other methods including lyophilization, evaporation, fluid bed drying, vacuum drying, or a combination of these techniques.

iv. Penetration Enhancers

[0619] In one embodiment, the present disclosure employs various penetration enhancers to effect the efficient delivery of nucleic acids, particularly RNAi agents, to the skin of animals. Most drugs are present in solution in both ionized and nonionized forms. However, usually only lipid soluble or lipophilic drugs readily cross cell membranes. It has been discovered that even non-lipophilic drugs can cross cell membranes if the membrane to be crossed is treated with a penetration enhancer. In addition to aiding the diffusion of non-lipophilic drugs across cell membranes, penetration enhancers also enhance the permeability of lipophilic drugs.

[0620] Penetration enhancers can be classified as belonging to one of five broad categories, i.e., surfactants, fatty acids, bile salts, chelating agents, and non-chelating non-surfactants (see e.g., Malmsten, M. Surfactants and polymers in drug delivery, Informa Health Care, New York, NY, 2002; Lee et al., Critical Reviews in Therapeutic Drug Carrier Systems, 1991, p. 92). Each of the above mentioned classes of penetration enhancers are described below in greater detail.

[0621] Surfactants (or “surface-active agents”) are chemical entities which, when dissolved in an aqueous solution, reduce the surface tension of the solution or the interfacial tension between the aqueous solution and another liquid, with the result that absorption of RNAi agents through the mucosa is enhanced. In addition to bile salts and fatty acids, these penetration enhancers include, for example, sodium lauryl sulfate, polyoxyethylene-9-lauryl ether and polyoxyethylene-20-cetyl ether) (see e.g., Malmsten, M. Surfactants and polymers in drug delivery, Informa Health Care, New York, NY, 2002; Lee et al., Critical Reviews in Therapeutic Drug Carrier Systems, 1991, p. 92); and perfluorochemical emulsions, such as FC-43. Takahashi et al., J. Pharm. Pharmacol., 1988, 40, 252).

[0622] Various fatty acids and their derivatives which act as penetration enhancers include, for example, oleic acid, lauric acid, capric acid (n-decanoic acid), myristic acid, palmitic acid, stearic acid, linoleic acid, linolenic acid, dicaprate, tricaprate, monoolein (1-monooleoyl-rac-glycerol), dilaurin, caprylic acid, arachidonic acid, glycerol 1-monocaprate, 1-dodecylazacycloheptan-2-one, acylcarnitines, acylcholines, C₁₋₂₀ alkyl esters thereof (e.g., methyl, isopropyl and t-butyl), and mono- and di-glycerides thereof (i.e., oleate, laurate, caprate, myristate, palmitate, stearate, linoleate, etc.) (see e.g., Touitou, E., et al. Enhancement in Drug Delivery, CRC Press, Danvers, MA, 2006; Lee et al., Critical Reviews in Therapeutic Drug Carrier Systems, 1991, p. 92; Muranishi, Critical Reviews in Therapeutic Drug Carrier Systems, 1990, 7, 1-33; El Hariri et al., J. Pharm. Pharmacol., 1992, 44, 651-654).

[0623] The physiological role of bile includes the facilitation of dispersion and absorption of lipids and fat-soluble vitamins (see e.g., Malmsten, M. Surfactants and polymers in drug delivery, Informa Health Care, New York, NY, 2002; Brunton, Chapter 38 in: Goodman & Gilman's The Pharmacological Basis of Therapeutics, 9th Ed., Hardman et al. Eds., McGraw-Hill, New York, 1996, pp. 934-935). Various natural bile salts, and their synthetic derivatives, act as penetration enhancers. Thus the term “bile salts” includes any of the naturally occurring components of bile as well as any of their synthetic derivatives. Suitable bile salts include, for example, cholic acid (or its pharmaceutically acceptable sodium salt, sodium cholate), dehydrocholic acid (sodium dehydrocholate), deoxycholic acid (sodium deoxycholate), glucholic acid (sodium glucholate), glycholic acid (sodium glycocholate), glycodeoxycholic acid (sodium glycodeoxycholate), taurocholic acid (sodium taurocholate), taurodeoxycholic acid (sodium taurodeoxycholate), chenodeoxycholic acid (sodium chenodeoxycholate), ursodeoxycholic acid (UDCA), sodium tauro-24,25-dihydro-fusidate (STDHF), sodium glycodihydrofusidate and polyoxyethylene-9-lauryl ether (POE) (see e.g., Malmsten, M. Surfactants and polymers in drug delivery, Informa Health Care, New York, NY, 2002; Lee et al., Critical Reviews in Therapeutic Drug Carrier Systems, 1991, page 92; Swinyard, Chapter 39 In: Remington's Pharmaceutical Sciences, 18th Ed., Gennaro, ed., Mack Publishing Co., Easton, Pa., 1990, pages 782-783; Muranishi, Critical Reviews in Therapeutic Drug Carrier Systems, 1990, 7, 1-33; Yamamoto et al., J. Pharm. Exp. Ther., 1992, 263, 25; Yamashita et al., J. Pharm. Sci., 1990, 79, 579-583).

[0624] Chelating agents, as used in connection with the present disclosure, can be defined as compounds that remove metallic ions from solution by forming complexes therewith, with the result that absorption of RNAi agents through the mucosa is enhanced. With regards to their use as penetration enhancers in the present disclosure, chelating agents have the added advantage of also serving as DNase inhibitors, as most characterized DNA nucleases require a divalent metal ion for catalysis and are thus inhibited by chelating agents (Jarrett, J. Chromatogr., 1993, 618, 315-339). Suitable chelating agents include but are not limited to disodium ethylenediaminetetraacetate (EDTA), citric acid, salicylates (e.g., sodium salicylate, 5-methoxysalicylate and homovanilate), N-acyl derivatives of collagen, laureth-9 and N-amino acyl derivatives of beta-diketones (enamines)(see e.g., Katdare, A. et al., Excipient development for pharmaceutical, biotechnology, and drug delivery, CRC Press, Danvers, MA, 2006; Lee et al., Critical Reviews in Therapeutic Drug Carrier Systems, 1991, page 92; Muranishi, Critical Reviews in Therapeutic Drug Carrier Systems, 1990, 7, 1-33; Buur et al., J. Control Rel., 1990, 14, 43-51).

[0625] As used herein, non-chelating non-surfactant penetration enhancing compounds can be defined as compounds that demonstrate insignificant activity as chelating agents or as surfactants but that nonetheless enhance absorption of RNAi agents through the alimentary mucosa (see e.g., Muranishi, Critical Reviews in Therapeutic Drug Carrier Systems, 1990, 7, 1-33). This class of penetration enhancers includes, for example, unsaturated cyclic ureas, 1-alkyl- and 1-alkenylazacyclo-alkanone derivatives (Lee et al., Critical Reviews in Therapeutic Drug Carrier Systems, 1991, page 92); and non-steroidal anti-inflammatory agents such as diclofenac sodium, indomethacin and phenylbutazone (Yamashita et al., J. Pharm. Pharmacol., 1987, 39, 621-626).

[0626] Agents that enhance uptake of RNAi agents at the cellular level can also be added to the pharmaceutical and other compositions of the present disclosure. For example, cationic lipids, such as lipofectin (Junichi et al, U.S. Pat. No. 5,705,188), cationic glycerol derivatives, and polycationic molecules, such as polylysine (WO 97/30731), are also known to enhance the cellular uptake of dsRNAs.

[0627] Other agents can be utilized to enhance the penetration of the administered nucleic acids, including glycols such as ethylene glycol and propylene glycol, pyrrols such as 2-pyrrol, azones, and terpenes such as limonene and menthone.

vi. Excipients

[0628] In contrast to a carrier compound, a “pharmaceutical carrier” or “excipient” is a pharmaceutically acceptable solvent, suspending agent or any other pharmacologically inert vehicle for delivering one or more nucleic acids to an animal. The excipient can be liquid or solid and is selected, with the planned manner of administration in mind, so as to provide for the desired bulk, consistency, etc., when combined with a nucleic acid and the other components of a given pharmaceutical composition. Typical pharmaceutical carriers include, but are not limited to, binding agents (e.g., pregelatinized maize starch, polyvinylpyrrolidone or hydroxypropyl methylcellulose, etc.); fillers (e.g., lactose and other sugars, microcrystalline cellulose, pectin, gelatin, calcium sulfate, ethyl cellulose, polyacrylates or calcium hydrogen phosphate, etc.); lubricants (e.g., magnesium stearate, talc, silica, colloidal silicon dioxide, stearic acid, metallic stearates, hydrogenated vegetable oils, corn starch, polyethylene glycols, sodium benzoate, sodium acetate, etc.); disintegrants (e.g., starch, sodium starch glycolate, etc.); and wetting agents (e.g., sodium lauryl sulphate, etc).

[0629] Pharmaceutically acceptable organic or inorganic excipients suitable for non-parenteral administration which do not deleteriously react with nucleic acids can also be used to formulate the compositions of the present disclosure. Suitable pharmaceutically acceptable carriers include, but are not limited to, water, salt solutions, alcohols, polyethylene glycols, gelatin, lactose, amylose, magnesium stearate, talc, silicic acid, viscous paraffin, hydroxymethylcellulose, polyvinylpyrrolidone and the like.

[0630] Formulations for topical administration of nucleic acids can include sterile and non-sterile aqueous solutions, non-aqueous solutions in common solvents such as alcohols, or solutions of the nucleic acids in liquid or solid oil bases. The solutions can also contain buffers, diluents and other suitable additives. Pharmaceutically acceptable organic or inorganic excipients suitable for non-parenteral administration which do not deleteriously react with nucleic acids can be used.

[0631] Suitable pharmaceutically acceptable excipients include, but are not limited to, water, salt solutions, alcohol, polyethylene glycols, gelatin, lactose, amylose, magnesium stearate, talc, silicic acid, viscous paraffin, hydroxymethylcellulose, polyvinylpyrrolidone and the like.

vii. Other Components

[0632] The compositions of the present disclosure can additionally contain other adjunct components conventionally found in pharmaceutical compositions, at their art-established usage levels. Thus, for example, the compositions can contain additional, compatible, pharmaceutically-active materials such as, for example, antipruritics, astringents, local anesthetics or anti-inflammatory agents, or can contain additional materials useful in physically formulating various dosage forms of the compositions of the present disclosure, such as dyes, flavoring agents, preservatives, antioxidants, opacifiers, thickening agents and stabilizers. However, such materials, when added, should not unduly interfere with the biological activities of the components of the compositions of the present disclosure. The formulations can be sterilized and, if desired, mixed with auxiliary agents, e.g., lubricants, preservatives, stabilizers, wetting agents, emulsifiers, salts for influencing osmotic pressure, buffers, colorings, flavorings or aromatic substances and the like which do not deleteriously interact with the nucleic acid(s) of the formulation.

[0633] Aqueous suspensions can contain substances which increase the viscosity of the suspension including, for example, sodium carboxymethylcellulose, sorbitol or dextran. The suspension can also contain stabilizers.

[0634] In some embodiments, pharmaceutical compositions featured in the disclosure include (a) one or more RNAi agents and (b) one or more agents which function by a non-RNAi mechanism and which are useful in treating an HTT-associated disorder. Examples of such agents include, but are not limited to, monoamine inhibitors, reserpine, anticonvulsants, antipsychotic agents, and antidepressants.

[0635] Toxicity and therapeutic efficacy of such compounds can be determined by standard pharmaceutical procedures in cell cultures or experimental animals, e.g., for determining the LD₅₀ (the dose lethal to 50% of the population) and the ED₅₀ (the dose therapeutically effective in 50% of the population). The dose ratio between toxic and therapeutic effects is the therapeutic index and it can be expressed as the ratio LD₅₀/ED₅₀. Compounds that exhibit high therapeutic indices are preferred.

[0636] The data obtained from cell culture assays and animal studies can be used in formulating a range of dosage for use in humans. The dosage of compositions featured herein in the disclosure lies generally within a range of circulating concentrations that include the ED₅₀ with little or no toxicity. The dosage can vary within this range depending upon the dosage form employed and the route of administration utilized. For any compound used in the methods featured in the disclosure, the therapeutically effective dose can be estimated initially from cell culture assays. A dose can be formulated in animal models to achieve a circulating plasma concentration range of the compound or, when appropriate, of the polypeptide product of a target sequence (e.g., achieving a decreased concentration of the polypeptide) that includes the IC₅₀ (i.e., the concentration of the test compound which achieves a half-maximal inhibition of symptoms) as determined in cell culture. Such information can be used to more accurately determine useful doses in humans. Levels in plasma can be measured, for example, by high performance liquid chromatography.

[0637] In addition to their administration, as discussed above, the RNAi agents featured in the disclosure can be administered in combination with other known agents effective in treatment of pathological processes mediated by nucleotide repeat expression. In any event, the administering physician can adjust the amount and timing of RNAi agent administration on the basis of results observed using standard measures of efficacy known in the art or described herein.

### VII. Kits

[0638] In certain aspects, the instant disclosure provides kits that include a suitable container containing a pharmaceutical formulation of a siRNA compound, e.g., a double-stranded siRNA compound, or ssiRNA compound, (e.g., a precursor, e.g., a larger siRNA compound which can be processed into a ssiRNA compound, or a DNA which encodes an siRNA compound, e.g., a double-stranded siRNA compound, or ssiRNA compound, or precursor thereof).

[0639] Such kits include one or more dsRNA agent(s) and instructions for use, e.g., instructions for administering a prophylactically or therapeutically effective amount of a dsRNA agent(s). The dsRNA agent may be in a vial or a pre-filled syringe. The kits may optionally further comprise means for administering the dsRNA agent (e.g., an injection device, such as a pre-filled syringe), or means for measuring the inhibition of C3 (e.g., means for measuring the inhibition of HTT mRNA, HTT protein, and/or HTT activity). Such means for measuring the inhibition of HTT may comprise a means for obtaining a sample from a subject, such as, e.g., a CSF and/or plasma sample. The kits of the invention may optionally further comprise means for determining the therapeutically effective or prophylactically effective amount.

[0640] In certain embodiments the individual components of the pharmaceutical formulation may be provided in one container, e.g., a vial or a pre-filled syringe. Alternatively, it may be desirable to provide the components of the pharmaceutical formulation separately in two or more containers, e.g., one container for a siRNA compound preparation, and at least another for a carrier compound. The kit may be packaged in a number of different configurations such as one or more containers in a single box. The different components can be combined, e.g., according to instructions provided with the kit. The components can be combined according to a method described herein, e.g., to prepare and administer a pharmaceutical composition. The kit can also include a delivery device.

### VII. Methods for Inhibiting HTT Expression

[0641] The present disclosure also provides methods of inhibiting expression of an HTT gene in a cell. The methods include contacting a cell with an RNAi agent, e.g., double stranded RNAi agent, or a pharmaceutical compostions comprising a dsRNA agent of the invention, in an amount effective to inhibit expression of HTT in the cell, thereby inhibiting expression of HTT in the cell. In certain embodiments of the disclosure, HTT is inhibited preferentially in CNS (e.g., brain) cells.

[0642] Contacting of a cell with an RNAi agent, e.g., a double stranded RNAi agent, may be done in vitro or in vivo. Contacting a cell in vivo with the RNAi agent includes contacting a cell or group of cells within a subject, e.g., a human subject, with the RNAi agent. Combinations of in vitro and in vivo methods of contacting a cell are also possible.

[0643] Contacting a cell may be direct or indirect, as discussed above. Furthermore, contacting a cell may be accomplished via a targeting ligand, including any ligand described herein or known in the art. In some embodiments, the targeting ligand is a carbohydrate moiety, e.g., a GalNAc ligand, or any other ligand that directs the RNAi agent to a site of interest.

[0644] The term “inhibiting,” as used herein, is used interchangeably with “reducing,” “silencing,” “downregulating,” “suppressing” and other similar terms, and includes any level of inhibition. In certain embodiments, a level of inhibition, e.g., for an RNAi agent of the instant disclosure, can be assessed in cell culture conditions, e.g., wherein cells in cell culture are transfected via Lipofectamine™-mediated transfection at a concentration in the vicinity of a cell of 10 nM or less, 1 nM or less, etc. Knockdown of a given RNAi agent can be determined via comparison of pre-treated levels in cell culture versus post-treated levels in cell culture, optionally also comparing against cells treated in parallel with a scrambled or other form of control RNAi agent. Knockdown in cell culture of, e.g., preferably 50% or more, can thereby be identified as indicative of “inhibiting” or “reducing”, “downregulating” or “suppressing”, etc. having occurred. It is expressly contemplated that assessment of targeted mRNA or encoded protein levels (and therefore an extent of “inhibiting”, etc. caused by an RNAi agent of the disclosure) can also be assessed in in vivo systems for the RNAi agents of the instant disclosure, under properly controlled conditions as described in the art.

[0645] The phrase “inhibiting expression of an HTT gene” or “inhibiting expression of HTT,” as used herein, includes inhibition of expression of any HTT gene (such as, e.g., a mouse HTT gene, a rat HTT gene, a monkey HTT gene, or a human HTT gene) as well as variants or mutants of an HTT gene that encode an HTT protein. Thus, the HTT gene may be a wild-type HTT gene, a mutant HTT gene, or a transgenic HTT gene in the context of a genetically manipulated cell, group of cells, or organism.

[0646] “Inhibiting expression of an HTT gene” includes any level of inhibition of an HTT gene, e.g., at least partial suppression of the expression of an HTT gene, such as an inhibition by at least 20%. In certain embodiments, inhibition is by at least 30%, at least 40%, preferably at least 50%, at least about 60%, at least 70%, at least about 80%, at least 85%, at least 90%, at least 95%, at least 96%, at least 97%, at least 98%, or at least 99%; or to below the level of detection of the assay method.

[0647] The expression of an HTT gene may be assessed based on the level of any variable associated with HTT gene expression, e.g., HTT mRNA level or HTT protein level, or, for example, the level of HTT expanded protein.

[0648] Inhibition may be assessed by a decrease in an absolute or relative level of one or more of these variables compared with a control level. The control level may be any type of control level that is utilized in the art, e.g., a pre-dose baseline level, or a level determined from a similar subject, cell, or sample that is untreated or treated with a control (such as, e.g., buffer only control or inactive agent control).

[0649] In some embodiments of the methods of the disclosure, expression of an HTT gene is inhibited by at least 20%, 30%, 40%, preferably at least 50%, 60%, 70%, 80%, 85%, 90%, or 95%, or to below the level of detection of the assay. In certain embodiments, the methods include a clinically relevant inhibition of expression of HTT, e.g. as demonstrated by a clinically relevant outcome after treatment of a subject with an agent to reduce the expression of HTT.

[0650] Inhibition of the expression of an HTT gene may be manifested by a reduction of the amount of mRNA expressed by a first cell or group of cells (such cells may be present, for example, in a sample derived from a subject) in which an HTT gene is transcribed and which has or have been treated (e.g., by contacting the cell or cells with an RNAi agent of the disclosure, or by administering an RNAi agent of the disclosure to a subject in which the cells are or were present) such that the expression of an HTT gene is inhibited, as compared to a second cell or group of cells substantially identical to the first cell or group of cells but which has not or have not been so treated (control cell(s) not treated with an RNAi agent or not treated with an RNAi agent targeted to the gene of interest). The degree of inhibition may be expressed in terms of:

$$\frac{( mRNA in control cells ) - ( mRNA in treated cells )}{( mRNA in control cells )} \cdot 100 \%$$

[0651] In other embodiments, inhibition of the expression of an HTT gene may be assessed in terms of a reduction of a parameter that is functionally linked to an HTT gene expression, e.g., HTT protein expression. HTT gene silencing may be determined in any cell expressing HTT, either endogenous or heterologous from an expression construct, and by any assay known in the art.

[0652] Inhibition of the expression of an HTT protein may be manifested by a reduction in the level of the HTT protein that is expressed by a cell or group of cells (e.g., the level of protein expressed in a sample derived from a subject). As explained above, for the assessment of mRNA suppression, the inhibition of protein expression levels in a treated cell or group of cells may similarly be expressed as a percentage of the level of protein in a control cell or group of cells.

[0653] A control cell or group of cells that may be used to assess the inhibition of the expression of an HTT gene includes a cell or group of cells that has not yet been contacted with an RNAi agent of the disclosure. For example, the control cell or group of cells may be derived from an individual subject (e.g., a human or animal subject) prior to treatment of the subject with an RNAi agent.

[0654] The level of HTT mRNA that is expressed by a cell or group of cells may be determined using any method known in the art for assessing mRNA expression. In one embodiment, the level of expression of HTT in a sample is determined by detecting a transcribed polynucleotide, or portion thereof, e.g., mRNA of the HTT gene. RNA may be extracted from cells using RNA extraction techniques including, for example, using acid phenol/guanidine isothiocyanate extraction (RNAzol B; Biogenesis), RNeasy™ RNA preparation kits (Qiagen®) or PAXgene (PreAnalytix, Switzerland). Typical assay formats utilizing ribonucleic acid hybridization include nuclear run-on assays, RT-PCR, RNase protection assays, northern blotting, in situ hybridization, and microarray analysis. Circulating HTT mRNA may be detected using methods the described in WO2012/177906, the entire contents of which are hereby incorporated herein by reference.

[0655] In some embodiments, the level of expression of HTT is determined using a nucleic acid probe. The term “probe”, as used herein, refers to any molecule that is capable of selectively binding to a specific HTT nucleic acid or protein, or fragment thereof. Probes can be synthesized by one of skill in the art, or derived from appropriate biological preparations. Probes may be specifically designed to be labeled. Examples of molecules that can be utilized as probes include, but are not limited to, RNA, DNA, proteins, antibodies, and organic molecules.

[0656] Isolated mRNA can be used in hybridization or amplification assays that include, but are not limited to, Southern or northern analyses, polymerase chain reaction (PCR) analyses and probe arrays. One method for the determination of mRNA levels involves contacting the isolated mRNA with a nucleic acid molecule (probe) that can hybridize to HTT mRNA. In one embodiment, the mRNA is immobilized on a solid surface and contacted with a probe, for example by running the isolated mRNA on an agarose gel and transferring the mRNA from the gel to a membrane, such as nitrocellulose. In an alternative embodiment, the probe(s) are immobilized on a solid surface and the mRNA is contacted with the probe(s), for example, in an Affymetrix® gene chip array. A skilled artisan can readily adapt known mRNA detection methods for use in determining the level of HTT mRNA.

[0657] An alternative method for determining the level of expression of HTT in a sample involves the process of nucleic acid amplification or reverse transcriptase (to prepare cDNA) of for example mRNA in the sample, e.g., by RT-PCR (the experimental embodiment set forth in Mullis, 1987, U.S. Pat. No. 4,683,202), ligase chain reaction (Barany (1991) Proc. Natl. Acad. Sci. USA 88:189-193), self sustained sequence replication (Guatelli et al. (1990) Proc. Natl. Acad. Sci. USA 87:1874-1878), transcriptional amplification system (Kwoh et al. (1989) Proc. Natl. Acad. Sci. USA 86:1173-1177), Q-Beta Replicase (Lizardi et al. (1988) Bio/Technology 6:1197), rolling circle replication (Lizardi et al., U.S. Pat. No. 5,854,033) or any other nucleic acid amplification method, followed by the detection of the amplified molecules using techniques well known to those of skill in the art. These detection schemes are especially useful for the detection of nucleic acid molecules if such molecules are present in very low numbers. In particular aspects of the disclosure, the level of expression of HTT is determined by quantitative fluorogenic RT-PCR (i.e., the TaqMan™ System), by a Dual-Glo® Luciferase assay, or by other art-recognized method for measurement of HTT expression or mRNA level.

[0658] The expression level of HTT mRNA may be monitored using a membrane blot (such as used in hybridization analysis such as northern, Southern, dot, and the like), or microwells, sample tubes, gels, beads or fibers (or any solid support comprising bound nucleic acids). See U.S. Pat. Nos. 5,770,722, 5,874,219, 5,744,305, 5,677,195 and 5,445,934, which are incorporated herein by reference. The determination of HTT expression level may also comprise using nucleic acid probes in solution.

[0659] In some embodiments, the level of mRNA expression is assessed using branched DNA (bDNA) assays or real time PCR (qPCR). The use of this PCR method is described and exemplified in the Examples presented herein. Such methods can also be used for the detection of HTT nucleic acids.

[0660] The level of HTT protein expression may be determined using any method known in the art for the measurement of protein levels. Such methods include, for example, electrophoresis, capillary electrophoresis, high performance liquid chromatography (HPLC), thin layer chromatography (TLC), hyperdiffusion chromatography, fluid or gel precipitin reactions, absorption spectroscopy, a colorimetric assays, spectrophotometric assays, flow cytometry, immunodiffusion (single or double), immunoelectrophoresis, western blotting, radioimmunoassay (RIA), enzyme-linked immunosorbent assays (ELISAs), immunofluorescent assays, electrochemiluminescence assays, and the like. Such assays can also be used for the detection of proteins indicative of the presence or replication of HTT proteins.

[0661] In some embodiments, the efficacy of the methods of the disclosure in the treatment of an HTT-related disease is assessed by a decrease in HTT mRNA level (e.g, by assessment of a CSF sample and/or plasma sample for HTT level, by brain biopsy, or otherwise).

[0662] In some embodiments of the methods of the disclosure, the RNAi agent is administered to a subject such that the RNAi agent is delivered to a specific site within the subject. The inhibition of expression of HTT may be assessed using measurements of the level or change in the level of HTT mRNA or HTT protein in a sample derived from a specific site within the subject, e.g., CNS cells. In certain embodiments, the methods include a clinically relevant inhibition of expression of HTT, e.g. as demonstrated by a clinically relevant outcome after treatment of a subject with an agent to reduce the expression of HTT, such as, for example, stabilization or inhibition of caudate atrophy (e.g., as assessed by volumetric MRI (vMRI)), a stabilization or reduction in neurofilament light chain (Nfl) levels in a CSF sample from a subject, a reduction in mutant HTT mRNA or a cleaved mutant HTT protein, e.g., one or both of full-length mutant HTT mRNA or protein and a cleaved mutant HTT mRNA or protein, and a stabilization or improvement in Unified Huntington's Disease Rating Scale (UHDRS) score.

[0663] As used herein, the terms detecting or determining a level of an analyte are understood to mean performing the steps to determine if a material, e.g., protein, RNA, is present. As used herein, methods of detecting or determining include detection or determination of an analyte level that is below the level of detection for the method used.

### IX. Methods of Treating or Preventing HTT-Associated Diseases

[0664] The present disclosure also provides methods of using an RNAi agent of the disclosure to reduce or inhibit HTT expression in a cell. The methods include contacting the cell with a dsRNA of the disclosure, or a pharmaceutical composition of the disclosure, and maintaining the cell for a time sufficient to obtain degradation of the mRNA transcript of an HTT gene, thereby inhibiting expression of the HTT gene in the cell. Reduction in gene expression can be assessed by any methods known in the art. For example, a reduction in the expression of HTT may be determined by determining the mRNA expression level of HTT using methods routine to one of ordinary skill in the art, e.g., northern blotting, qRT-PCR; by determining the protein level of HTT using methods routine to one of ordinary skill in the art, such as western blotting, immunological techniques.

[0665] In the methods of the disclosure the cell may be contacted in vitro or in vivo, i.e., the cell may be within a subject.

[0666] A cell suitable for treatment using the methods of the disclosure may be any cell that expresses an HTT gene. A cell suitable for use in the methods of the disclosure may be a mammalian cell, e.g., a primate cell (such as a human cell or a non-human primate cell, e.g., a monkey cell or a chimpanzee cell), a non-primate cell (such as a a rat cell, or a mouse cell). In one embodiment, the cell is a human cell, e.g., a human CNS cell.

[0667] HTT expression is inhibited in the cell by at least about 30, 40, 50, 55, 60, 65, 70, 75, 80, 85, 90, 95, 96, 97, 98, 99, or about 100%, i.e., to below the level of detection. In preferred embodiments, HTT expression is inhibited by at least 50%.

[0668] The in vivo methods of the disclosure may include administering to a subject a composition containing an RNAi agent, where the RNAi agent includes a nucleotide sequence that is complementary to at least a part of an RNA transcript of the HTT gene of the mammal to be treated.

[0669] When the organism to be treated is a mammal such as a human, the composition can be administered by any means known in the art including, but not limited to oral, intraperitoneal, or parenteral routes, including intracranial (e.g., intraventricular, intraparenchymal, and intrathecal), intravenous, intramuscular, intravitreal, subcutaneous, transdermal, airway (aerosol), nasal, rectal, and topical (including buccal and sublingual) administration. In certain embodiments, the compositions are administered by intravenous infusion or injection. In certain embodiments, the compositions are administered by subcutaneous injection. In certain embodiments, the compositions are administered by intrathecal injection.

[0670] In some embodiments, the administration is via a depot injection. A depot injection may release the RNAi agent in a consistent way over a prolonged time period. Thus, a depot injection may reduce the frequency of dosing needed to obtain a desired effect, e.g., a desired inhibition of HTT, or a therapeutic or prophylactic effect. A depot injection may also provide more consistent serum concentrations. Depot injections may include subcutaneous injections or intramuscular injections. In preferred embodiments, the depot injection is a subcutaneous injection.

[0671] In some embodiments, the administration is via a pump. The pump may be an external pump or a surgically implanted pump. In certain embodiments, the pump is a subcutaneously implanted osmotic pump. In other embodiments, the pump is an infusion pump. An infusion pump may be used for intracranial, intravenous, subcutaneous, arterial, or epidural infusions. In preferred embodiments, the infusion pump is a subcutaneous infusion pump. In other embodiments, the pump is a surgically implanted pump that delivers the RNAi agent to the CNS.

[0672] The mode of administration may be chosen based upon whether local or systemic treatment is desired and based upon the area to be treated. The route and site of administration may be chosen to enhance targeting.

[0673] In one aspect, the present disclosure also provides methods for inhibiting the expression of an HTT gene in a mammal. The methods include administering to the mammal a composition comprising a dsRNA that targets an HTT gene in a cell of the mammal and maintaining the mammal for a time sufficient to obtain degradation of the mRNA transcript of the HTT gene, thereby inhibiting expression of the HTT gene in the cell. Reduction in gene expression can be assessed by any methods known it the art and by methods, e.g. qRT-PCR, described herein. In some embodiments, the dsRNA is present in a composition, such as a pharmaceutical composition.

[0674] Reduction in protein production can be assessed by any methods known it the art and by methods, e.g. ELISA, described herein. In one embodiment, a CNS biopsy sample or a cerebrospinal fluid (CSF) sample serves as the tissue material for monitoring the reduction in HTT gene or protein expression (or of a proxy therefore).

[0675] The present disclosure further provides methods of treatment of a subject in need thereof. The treatment methods of the disclosure include administering an RNAi agent of the disclosure to a subject, e.g., a subject that would benefit from inhibition of HTT expression, in a therapeutically effective amount of an RNAi agent targeting an HTT gene or a pharmaceutical composition comprising an RNAi agent targeting aHTT gene.

[0676] In addition, the present disclosure provides methods of preventing, treating or inhibiting the progression of an HTT-associated disease or disorder (e.g., Huntington's disease), in a subject, such as the progression of an HTT-associated disease or disorder. The methods include administering to the subject a therapeutically effective amount of any of the RNAi agent, e.g., dsRNA agents, or the pharmaceutical composition provided herein, thereby preventing, treating or inhibiting the progression of an HTT-associated disease or disorder in the subject.

[0677] An RNAi agent of the disclosure may be administered as a “free RNAi agent.” A free RNAi agent is administered in the absence of a pharmaceutical composition. The naked RNAi agent may be in a suitable buffer solution. The buffer solution may comprise acetate, citrate, prolamine, carbonate, or phosphate, or any combination thereof. In one embodiment, the buffer solution is phosphate buffered saline (PBS). The pH and osmolarity of the buffer solution containing the RNAi agent can be adjusted such that it is suitable for administering to a subject.

[0678] Alternatively, an RNAi agent of the disclosure may be administered as a pharmaceutical composition, such as a dsRNA liposomal formulation.

[0679] Subjects that would benefit from a reduction or inhibition of HTT gene expression are those having an HTT-associated disease, e.g., Huntington's disease.

[0680] The disclosure further provides methods for the use of an RNAi agent or a pharmaceutical composition thereof, e.g., for treating a subject that would benefit from reduction or inhibition of HTT expression, e.g., a subject having an HTT-associated disorder, in combination with other pharmaceuticals or other therapeutic methods, e.g., with known pharmaceuticals or known therapeutic methods, such as, for example, those which are currently employed for treating these disorders. For example, in certain embodiments, an RNAi agent targeting HTT is administered in combination with, e.g., an agent useful in treating an HTT-associated disorder as described elsewhere herein or as otherwise known in the art. For example, additional agents suitable for treating a subject that would benefit from reduction in HTT expression, e.g., a subject having an HTT-associated disorder, may include agents currently used to treat symptoms of HTT. The RNAi agent and additional therapeutic agents may be administered at the same time or in the same combination, e.g., intrathecally, or the additional therapeutic agent can be administered as part of a separate composition or at separate times or by another method known in the art or described herein.

[0681] Exemplary additional therapeutics include, for example, a monoamine inhibitor, e.g., tetrabenazine (Xenazine), deutetrabenazine (Austedo), and reserpine, an anticonvulsant, e.g., valproic acid (Depakote, Depakene, Depacon), and clonazepam (Klonopin), an antipsychotic agent, e.g., risperidone (Risperdal), and haloperidol (Haldol), and an antidepressant, e.g., paroxetine (Paxil).

[0682] In one embodiment, the method includes administering a composition featured herein such that expression of the target HTT gene is decreased, for at least one month. In preferred embodiments, expression is decreased for at least 2 months, 3 months, or 6 months.

[0683] Preferably, the RNAi agents useful for the methods and compositions featured herein specifically target RNAs (primary or processed) of the target HTT gene. Compositions and methods for inhibiting the expression of these genes using RNAi agents can be prepared and performed as described herein.

[0684] Administration of the dsRNA according to the methods of the disclosure may result in a reduction of the severity, signs, symptoms, or markers of such diseases or disorders in a patient with an HTT-associated disorder. By “reduction” in this context is meant a statistically significant or clinically significant decrease in such level. The reduction can be, for example, at least 5%, 10%, 15%, 20%, 25%, 30%, 35%, 40%, 45%, 50%, 55%, 60%, 65%, 70%, 75%, 80%, 85%, 90%, 95%, or about 100%.

[0685] Efficacy of treatment or prevention of disease can be assessed, for example by measuring disease progression, disease remission, symptom severity, reduction in pain, quality of life, dose of a medication required to sustain a treatment effect, level of a disease marker or any other measurable parameter appropriate for a given disease being treated or targeted for prevention. It is well within the ability of one skilled in the art to monitor efficacy of treatment or prevention by measuring any one of such parameters, or any combination of parameters. For example, efficacy of treatment of an HTT-associated disorder may be assessed, for example, by periodic monitoring of a subject's. Comparisons of the later readings with the initial readings provide a physician an indication of whether the treatment is effective. It is well within the ability of one skilled in the art to monitor efficacy of treatment or prevention by measuring any one of such parameters, or any combination of parameters. In connection with the administration of an RNAi agent targeting HTT or pharmaceutical composition thereof, “effective against” an HTT-associated disorder indicates that administration in a clinically appropriate manner results in a beneficial effect for at least a statistically significant fraction of patients, such as an improvement of symptoms, a cure, a reduction in disease, extension of life, improvement in quality of life, or other effect generally recognized as positive by medical doctors familiar with treating HTT-associated disorders and the related causes.

[0686] A treatment or preventive effect is evident when there is a statistically significant improvement in one or more parameters of disease status, or by a failure to worsen or to develop symptoms where they would otherwise be anticipated. As an example, a favorable change of at least 10% in a measurable parameter of disease, and preferably at least 20%, 30%, 40%, 50% or more can be indicative of effective treatment. Efficacy for a given RNAi agent drug or formulation of that drug can also be judged using an experimental animal model for the given disease as known in the art. When using an experimental animal model, efficacy of treatment is evidenced when a statistically significant reduction in a marker or symptom is observed.

[0687] Alternatively, the efficacy can be measured by a reduction in the severity of disease as determined by one skilled in the art of diagnosis based on a clinically accepted disease severity grading scale. Any positive change resulting in e.g., lessening of severity of disease measured using the appropriate scale, represents adequate treatment using an RNAi agent or RNAi agent formulation as described herein.

[0688] Subjects can be administered a therapeutic amount of dsRNA, such as about 0.01 mg/kg to about 200 mg/kg.

[0689] The RNAi agent can be administered intrathecally, via intravitreal injection, or by intravenous infusion over a period of time, on a regular basis. In certain embodiments, after an initial treatment regimen, the treatments can be administered on a less frequent basis. Administration of the RNAi agent can reduce HTT levels, e.g., in a cell, tissue, blood, CSF sample or other compartment of the patient by at least 20%, 30%, 40%, 50%, 55%, 60%, 65%, 70,% 75%, 80%, 85%, 90%, 95%, 96%, 97%, 98%, or at least about 99% or more. In a preferred embodiment, administration of the RNAi agent can reduce HTT levels, e.g., in a cell, tissue, blood, CSF sample or other compartment of the patient by at least 50%.

[0690] Before administration of a full dose of the RNAi agent, patients can be administered a smaller dose, such as a 5% infusion reaction, and monitored for adverse effects, such as an allergic reaction. In another example, the patient can be monitored for unwanted immunostimulatory effects, such as increased cytokine (e.g., TNF-alpha or INF-alpha) levels.

[0691] Alternatively, the RNAi agent can be administered subcutaneously, i.e., by subcutaneous injection. One or more injections may be used to deliver the desired, e.g., monthly dose of RNAi agent to a subject. The injections may be repeated over a period of time. The administration may be repeated on a regular basis. In certain embodiments, after an initial treatment regimen, the treatments can be administered on a less frequent basis. A repeat-dose regimine may include administration of a therapeutic amount of RNAi agent on a regular basis, such as monthly or extending to once a quarter, twice per year, once per year. In certain embodiments, the RNAi agent is administered about once per month to about once per quarter (i.e., about once every three months).

[0692] Unless otherwise defined, all technical and scientific terms used herein have the same meaning as commonly understood by one of ordinary skill in the art to which this invention belongs. Although methods and materials similar or equivalent to those described herein can be used in the practice or testing of the RNAi agents and methods featured in the invention, suitable methods and materials are described below. All publications, patent applications, patents, and other references mentioned herein are incorporated by reference in their entirety. In case of conflict, the present specification, including definitions, will control. In addition, the materials, methods, and examples are illustrative only and not intended to be limiting.

### EXAMPLES

### Example 1. RNAi Agent Design, Synthesis, Selection, and In Vitro Evaluation

[0693] This Example describes methods for the design, synthesis, selection, and in vitro evaluation of HTT RNAi agents.

### Source of Reagents

[0694] Where the source of a reagent is not specifically given herein, such reagent can be obtained from any supplier of reagents for molecular biology at a quality/purity standard for application in molecular biology.

### Bioinformatics

[0695] siRNAs targeting intron 1 of the human huntingtin transcript (HTT; NCBI Reference Sequence: NG_009378.1 (Homo sapiens huntingtin (HTT), RefSeqGene (LRG_763) on chromosome 4); or NCBI Reference Sequence: NC_000004.12 (Homo sapiens chromosome 4, GRCh38.p13 Primary Assembly)) were designed using custom R and Python scripts.

[0696] A detailed list of the unmodified HTT sense and antisense strand nucleotide sequences are shown in Table 2. A detailed list of the modified HTT sense and antisense strand nucleotide sequences are shown in Table 3.

[0697] It is to be understood that, throughout the application, a duplex name without a decimal is equivalent to a duplex name with a decimal which merely references the batch number of the duplex. For example, AD-564727 is equivalent to AD-564727.1.

### Cell Culture and Transfections

[0698] Cos7 were cultured according to standard methods and were transfected with the iRNA duplex of interest.

[0699] Briefly, cells were transfected by adding 7.5 μL of Opti-MEM plus 0.1 μL of RNAiMAX per well (Invitrogen, Carlsbad CA. cat #13778-150) to 2.5 μL of each siRNA duplex to an individual well in a 384-well plate. The cells were then incubated at room temperature for 15 minutes. Forty μL of MEDIA containing ˜1.5×10⁴ cells was then added to the siRNA mixture. Cells were incubated for 24 hours prior to RNA purification. Single dose experiments were performed in A549 cells at 10 nM. Single dose experiments were performed in at 10 nM, 3 nM, 1 nM, and 0.1 nM.

### In Vitro Dual-Luciferase and Endogenous Screening Assays

[0700] Cos7 cells were transfected by adding 50 μL of siRNA duplexes and 75 ng of a plasmid, comprising human HTT target sequence, nucleotides 5001-6271 of NG_009378.1, per well along with 100 μL of Opti-MEM plus 0.5 μL of Lipofectamine 2000 per well (Invitrogen, Carlsbad CA. cat #13778-150) and then incubated at room temperature for 15 minutes. The mixture was then added to the cells which are re-suspended in 35 μL of fresh complete media. The transfected cells were incubated at 37° C. in an atmosphere of 5% CO2. Single-dose experiments were performed at 10 nM or 50 nM.

[0701] Twenty-four hours after the siRNAs and psiCHECK2 plasmid are transfected; Firefly (transfection control) and Renilla (fused to HTT target sequence comprising nucleotides 5001-6271 of NG_009378.1) luciferase were measured. First, media was removed from cells. Then Firefly luciferase activity was measured by adding 75 μL of Dual-Glo® Luciferase Reagent equal to the culture medium volume to each well and mix. The mixture was incubated at room temperature for 30 minutes before luminescense (500 nm) was measured on a Spectramax (Molecular Devices) to detect the Firefly luciferase signal. Renilla luciferase activity was measured by adding 75 μL of room temperature of Dual-Glo® Stop & Glo® Reagent to each well and the plates were incubated for 10-15 minutes before luminescence was again measured to determine the Renilla luciferase signal. The Dual-Glo® Stop & Glo® Reagent quenches the firefly luciferase signal and sustained luminescence for the Renilla luciferase reaction. siRNA activity was determined by normalizing the Renilla (MUC5B) signal to the Firefly (control) signal within each well. The magnitude of siRNA activity was then assessed relative to cells that were transfected with the same vector but were not treated with siRNA or were treated with a non-targeting siRNA. All transfections were done with n=4.

Total RNA Isolation Using DYNABEADS mRNA Isolation Kit

[0702] RNA is isolated using an automated protocol on a BioTek-EL406 platform using DYNABEADs (Invitrogen, cat #61012). Briefly, 70 μL of Lysis/Binding Buffer and 10 μL of lysis buffer containing 3 μL of magnetic beads is added to the plate with cells. Plates are incubated on an electromagnetic shaker for 10 minutes at room temperature and then magnetic beads are captured and the supernatant was removed. Bead-bound RNA are then washed 2 times with 150 μL Wash Buffer A and once with Wash Buffer B. Beads are then washed with 150 μL Elution Buffer, re-captured and supernatant removed.

cDNA Synthesis Using ABI High Capacity cDNA Reverse Transcription Kit (Applied Biosystems, Foster City, CA, Cat #4368813)

[0703] Ten μL of a master mix containing 1 μL 10× Buffer, 0.4 μL 25×dNTPs, 1 μL 10× Random primers, 0.5 μL Reverse Transcriptase, 0.5 μL RNase inhibitor and 6.6 μL of H₂O per reaction is added to RNA isolated above. Plates are sealed, mixed, and incubated on an electromagnetic shaker for 10 minutes at room temperature, followed by 2 hour incubation at 37° C.

### Real Time PCR

[0704] Two μL of cDNA is added to a master mix containing 0.5 μL of human or mouse GAPDH TaqMan Probe (ThermoFisher cat 4352934E or 4351309) and 0.5 μL of appropriate HTT probe (commercially available, e.g., from Thermo Fisher) and 5 μL Lightcycler 480 probe master mix (Roche Cat #04887301001) per well in a 384 well plates (Roche cat #04887301001). Real time PCR is done in a LightCycler480 Real Time PCR system (Roche). Each duplex is tested with N=4 and data are normalized to cells transfected with a non-targeting control siRNA. To calculate relative fold change, real time data are analyzed using the ΔΔCt method and normalized to assays performed with an appropriate control.

[0705] The results of the dual-luciferase assays of the agents are provided in Table 4.

TABLE 1
Abbreviations of nucleotide monomers used in nucleic acid sequence representation. It will
be understood that these monomers, when present in an oligonucleotide, are mutually linked by 5′-3′-
phosphodiester bonds; and it is understood that when the nucleotide contains a 2′-fluoro modification,
then the fluoro replaces the hydroxy at that position in the parent nucleotide (i.e., it is a 2′-deoxy-2′-
fluoronucleotide). It is to be further understood that the nucleotide abbreviations in the table omit the
3′-phosphate (i.e., they are 3′-OH) when placed at the 3′-terminal position of an oligonucleotide.

| Abbreviation | Nucleotide(s) |
|---|---|
| A | Adenosine-3′-phosphate |
| Ab | beta-L-adenosine-3′-phosphate |
| Abs | beta-L-adenosine-3′-phosphorothioate |
| Af | 2′-fluoroadenosine-3′-phosphate |
| Afs | 2′-fluoroadenosine-3′-phosphorothioate |
| As | adenosine-3′-phosphorothioate |
| C | cytidine-3′-phosphate |
| Cb | beta-L-cytidine-3′-phosphate |
| Cbs | beta-L-cytidine-3′-phosphorothioate |
| Cf | 2′-fluorocytidine-3′-phosphate |
| Cfs | 2′-fluorocytidine-3′-phosphorothioate |
| Cs | cytidine-3′-phosphorothioate |
| G | guanosine-3′-phosphate |
| Gb | beta-L-guanosine-3′-phosphate |
| Gbs | beta-L-guanosine-3′-phosphorothioate |
| Gf | 2′-fluoroguanosine-3′-phosphate |
| Gfs | 2′-fluoroguanosine-3′-phosphorothioate |
| Gs | guanosine-3′-phosphorothioate |
| T | 5′-methyluridine-3′-phosphate |
| Tf | 2′-fluoro-5-methyluridine-3′-phosphate |
| Tfs | 2′-fluoro-5-methyluridine-3′-phosphorothioate |
| Ts | 5-methyluridine-3′-phosphorothioate |
| U | Uridine-3′-phosphate |
| Uf | 2′-fluorouridine-3′-phosphate |
| Ufs | 2′-fluorouridine-3′-phosphorothioate |
| Us | uridine-3′-phosphorothioate |
| N | any nucleotide, modified or unmodified |
| a | 2′-O-methyladenosine-3′-phosphate |
| as | 2′-O-methyladenosine-3′-phosphorothioate |
| c | 2′-O-methylcytidine-3′-phosphate |
| cs | 2′-O-methylcytidine-3′-phosphorothioate |
| g | 2′-O-methylguanosine-3′-phosphate |
| gs | 2′-O-methylguanosine-3′-phosphorothioate |
| t | 2′-O-methyl-5-methyluridine-3′-phosphate |
| ts | 2′-O-methyl-5-methyluridine-3′-phosphorothioate |
| u | 2′-O-methyluridine-3′-phosphate |
| us | 2′-O-methyluridine-3′-phosphorothioate |
| s | phosphorothioate linkage |
| L96 | N-[tris(GalNAc-alkyl)-amidodecanoyl)]-4-hydroxyprolinol |
| | Hyp-(GalNAc-alkyl)3 |
| | (2S,4R)-1-[29-[2-(acetylamino)-2-deoxy-ß-D-galactopyranosyl]oxy]-14,14- |
| | bis[[3-[3-[[5-[2-(acetylamino)-2-deoxy-ß-D-galactopyranosyl]oxy]-1- |
| | oxopentyl]amino]propyl]amino]-3-oxopropoxy]methyl]-1,12,19,25-tetraoxo- |
| | 16-oxa-13,20,24-triazanonacos-1-yl]-4-hydroxy-2-hydroxymethylpyrrolidine |
| | [chemical structure] |
| uL96 | 2′-O-methyluridine-3′-phosphate ((2S,4R)-1-[29-[2-(acetylamino)-2- |
| | deoxy-ß-D-galactopyranosyl]oxy]-14,14-bis[[3-[3-[5-[2- |
| | (acetylamino)-2-deoxy-ß-D-galactopyranosyl]oxy]-1- |
| | oxopentyl]amino]propyl]amino]-3-oxopropoxy]methyl]-1,12,19,25- |
| | tetraoxo-16-oxa-13,20,24-triazanonacos-1-yl]-4-hydroxy-2- |
| | pyrrolidinyl)methyl ester |
| | [chemical structure] |
| Y34 | 2-hydroxymethyl-tetrahydrofurane-4-methoxy-3-phosphate (abasic 2′-OMe |
| | furanose) |
| | [chemical structure] |
| Y44 | inverted abasic DNA (2-hydroxymethyl-tetrahydrofurane-5-phosphate) |
| | [chemical structure] |
| L10 | N-(cholesterylcarboxamidocaproyl)-4-hydroxyprolinol (Hyp-C6-Chol) |
| | [chemical structure] |
| (Agn) | Adenosine-glycol nucleic acid (GNA) S-Isomer |
| (Cgn) | Cytidine-glycol nucleic acid (GNA) S-Isomer |
| (Ggn) | Guanosine-glycol nucleic acid (GNA) S-Isomer |
| (Tgn) | Thymidine-glycol nucleic acid (GNA) S-Isomer |
| P | Phosphate |
| VP | Vinyl-phosphonate |
| dA | 2-deoxyadenosine-3′-phosphate |
| dAs | 2′-deoxyadenosine-3′-phosphorothioate |
| dC | 2′-deoxycytidine-3′-phosphate |
| dCs | 2-deoxycytidine-3′-phosphorothioate |
| dG | 2-deoxyguanosine-3-phosphate |
| dGs | 2′-deoxyguanosine-3′-phosphorothioate |
| dT | 2′-deoxythymidine-3′-phosphate |
| dTs | 2′-deoxythymidine-3′-phosphorothioate |
| dU | 2′-deoxyuridine |
| dUs | 2′-deoxyuridine-3′-phosphorothioate |
| (Ahd) | 2′-O-hexadecyl-adenosine-3′-phosphate |
| (Ahds) | 2′-O-hexadecyl-adenosine-3′-phosphorothioate |
| (Chd) | 2′-O-hexadecyl-cytidine-3′-phosphate |
| (Chds) | 2′-O-hexadecyl-cytidine-3′-phosphorothioate |
| (Ghd) | 2′-O-hexadecyl-guanosine-3′-phosphate |
| (Ghds) | 2′-O-hexadecyl-guanosine-3′-phosphorothioate |
| (Uhd) | 2′-O-hexadecyl-uridine-3′-phosphate |
| (Uhds) | 2′-O-hexadecyl-uridine-3′-phosphorothioate |
| (C2p) | cytidine-2′-phosphate |
| (G2p) | guanosine-2′-phosphate |
| (U2p) | uridine-2′-phosphate |
| (A2p) | adenosine-2′-phosphate |

TABLE 2
Unmodified Sense and Antisense Strand Sequences of Intron 1 Targeting HTT dsRNA Agents

| | | | Sense | Sense | | | | Antisense |
|---|---|---|---|---|---|---|---|---|
| | Sense | SEQ | Range | Range | Antisense | SEQ | Antisense | Range |
| Duplex | Sequence | ID | (NC_ | (NG_ | Sequence | ID | Range | (NG_ |
| Name | 5′ to 3′ | NO: | 000004.12) | 009378.1) | 5′ to 3′ | NO: | (NC_000004.12) | 009378.1) |
| AD- | GGCGGUAACCCUG | | 3075147- | 5473-5493 | UCAGGCTGCAGGG | | 3075145-3075167 | 5471-5493 |
| 1640313 | CAGCCUGA | | 3075167 | | UUACCGCCAU | | | |
| AD- | GCAGAGACAGAG | | 3075195- | 5521-5541 | UCUGGGTCACUCU | | 3075193-3075215 | 5519-5541 |
| 1640314 | UGACCCAGA | | 3075215 | | GUCUCUGCGG | | | |
| AD- | AGACAGAGUGAC | | 3075199- | 5525-5545 | UGUUGCTGGGUCA | | 3075197-3075219 | 5523-5545 |
| 1640315 | CCAGCAACA | | 3075219 | | CUCUGUCUCU | | | |
| AD- | CAGAGUGACCCAG | | 3075202 | 5528-5548 | UUGGGUTGCUGG | | 3075200-3075222 | 5526-5548 |
| 1640316 | CAACCCAA | | 3075222 | | GUCACUCUGUC | | | |
| AD- | AGAGUGACCCAGC | | 3075203- | 5529-5549 | UCUGGGTUGCUGG | | 3075201-3075223 | 5527-5549 |
| 1640317 | AACCCAGA | | 3075223 | | GUCACUCUGU | | | |
| AD- | AGCAACCCAGAGC | | 3075213- | 5539-5559 | UCUCAUGGGCUCU | | 3075211-3075233 | 5537-5559 |
| 1640318 | CCAUGAGA | | 3075233 | | GGGUUGCUGG | | | |
| AD- | AGCAACCCAGAGC | | 3075213- | 5539-5559 | UCUCAUGGGCUCU | | 3075211-3075233 | 5537-5559 |
| 1640319 | CCAUGAGA | | 3075233 | | GGGUUGCUGG | | | |
| AD- | GCAACCCAGAGCC | | 3075214- | 5540-5560 | UCCUCAUGGGCUC | | 3075212-3075234 | 5538-5560 |
| 1640320 | CAUGAGGA | | 3075234 | | UGGGUUGCUG | | | |
| AD- | GCAACCCAGAGCC | | 3075214- | 5540-5560 | UCCUCATGGGCTC | | 3075212-3075234 | 5538-5560 |
| 1640321 | CAUGAGGA | | 3075234 | | UGGGUUGCUG | | | |
| AD- | CAACCCAGAGCCC | | 3075215- | 5541-5561 | UCCCTCAUGGGCU | | 3075213-3075235 | 5539-5561 |
| 1640322 | AUGAGGGA | | 3075235 | | CUGGGUUGCU | | | |
| AD- | CAACCCAGAGCCC | | 3075215- | 5541-5561 | UCCCUCAUGGGCU | | 3075213-3075235 | 5539-5561 |
| 1640323 | AUGAGGGA | | 3075235 | | CUGGGUUGCU | | | |
| AD- | CAACCCAGAGCCC | | 3075215 | 5541-5561 | UCCCTCAUGGGCU | | 3075213-3075235 | 5539-5561 |
| 1640324 | AUGAGGGA | | 3075235 | | CUGGGUUGCU | | | |
| AD- | ACCCAGAGCCCAU | | 3075217- | 5543-5563 | UGUCCCTCAUGGG | | 3075215-3075237 | 5541-5563 |
| 1640325 | GAGGGACA | | 3075237 | | CUCUGGGUUG | | | |
| AD- | CGCUCCCUCACUU | | 3075279- | 5605-5625 | UAAGACCCAAGU | | 3075277-3075299 | 5603-5625 |
| 1640326 | GGGUCUUA | | 3075299 | | GAGGGAGCGGG | | | |
| AD- | CGCUCCCUCACUU | | 3075279- | 5605-5625 | UAAGACCCAAGTG | | 3075277-3075299 | 5603-5625 |
| 1640327 | GGGUCUUA | | 3075299 | | AGGGAGCGGG | | | |
| AD- | CUCCCUCACUUGG | | 3075281- | 5607-5627 | UGGAAGACCCAA | | 3075279-3075301 | 5605-5627 |
| 1640328 | GUCUUCCA | | 3075301 | | GUGAGGGAGCG | | | |
| AD- | CCCUCACUUGGGU | | 3075283- | 5609-5629 | UAGGGAAGACCC | | 3075281-3075303 | 5607-5629 |
| 1640329 | CUUCCCUA | | 3075303 | | AAGUGAGGGAG | | | |
| AD- | CCUCACUUGGGUC | | 3075284- | 5610-5630 | UAAGGGAAGACC | | 3075282-3075304 | 5608-5630 |
| 1640330 | UUCCCUUA | | 3075304 | | CAAGUGAGGGA | | | |
| AD- | CCUCACUUGGGUC | | 3075284- | 5610-5630 | UAAGGGAAGACC | | 3075282-3075304 | 5608-5630 |
| 1640331 | UUCCCUUA | | 3075304 | | CAAGUGAGGGA | | | |
| AD- | CCUCACUUGGGUC | | 3075284- | 5610-5630 | UAAGGGAAGACC | | 3075282-3075304 | 5608-5630 |
| 1640332 | UUCCCUUA | | 3075304 | | CAAGUGAGGGA | | | |
| AD- | CACUUGGGUCUUC | | 3075287- | 5613-5633 | UGACAAGGGAAG | | 3075285-3075307 | 5611-5633 |
| 1640333 | CCUUGUCA | | 3075307 | | ACCCAAGUGAG | | | |
| AD- | CACUUGGGUCUUC | | 3075287- | 5613-5633 | UGACAAGGGAAG | | 3075285-3075307 | 5611-5633 |
| 1640334 | CCUUGUCA | | 3075307 | | ACCCAAGUGAG | | | |
| AD- | ACUUGGGUCUUCC | | 3075288- | 5614-5634 | UGGACAAGGGAA | | 3075286-3075308 | 5612-5634 |
| 1640335 | CUUGUCCA | | 3075308 | | GACCCAAGUGA | | | |
| AD- | ACUUGGGUCUUCC | | 3075288- | 5614-5634 | UGGACAAGGGAA | | 3075286-3075308 | 5612-5634 |
| 1640336 | CUUGUCCA | | 3075308 | | GACCCAAGUGA | | | |
| AD- | ACUUGGGUCUUCC | | 3075288- | 5614-5634 | UGGACAAGGGAA | | 3075286-3075308 | 5612-5634 |
| 1640337 | CUUGUCCA | | 3075308 | | GACCCAAGUGA | | | |
| AD- | CUUGGGUCUUCCC | | 3075289- | 5615-5635 | UAGGACAAGGGA | | 3075287-3075309 | 5613-5635 |
| 1640338 | UUGUCCUA | | 3075309 | | AGACCCAAGUG | | | |
| AD- | CUUGGGUCUUCCC | | 3075289- | 5615-5635 | UAGGACAAGGGA | | 3075287-3075309 | 5613-5635 |
| 1640339 | UUGUCCUA | | 3075309 | | AGACCCAAGUG | | | |
| AD- | UGGGUCUUCCCUU | | 3075291- | 5617-5637 | UAGAGGACAAGG | | 3075289-3075311 | 5615-5637 |
| 1640340 | GUCCUCUA | | 3075311 | | GAAGACCCAAG | | | |
| AD- | GUCUUCCCUUGUC | | 3075294- | 5620-5640 | UGCGAGAGGACA | | 3075292-3075314 | 5618-5640 |
| 1640341 | CUCUCGCA | | 3075314 | | AGGGAAGACCC | | | |
| AD- | UCUUCCCUUGUCC | | 3075295- | 5621-5641 | UCGCGAGAGGAC | | 3075293-3075315 | 5619-5641 |
| 1640342 | UCUCGCGA | | 3075315 | | AAGGGAAGACC | | | |
| AD- | UCUUCCCUUGUCC | | 3075295- | 5621-5641 | UCGCGAGAGGAC | | 3075293-3075315 | 5619-5641 |
| 1640343 | UCUCGCGA | | 3075315 | | AAGGGAAGACC | | | |
| AD- | CUUCCCUUGUCCU | | 3075296- | 5622-5642 | UUCGCGAGAGGA | | 3075294-3075316 | 5620-5642 |
| 1640344 | CUCGCGAA | | 3075316 | | CAAGGGAAGAC | | | |
| AD- | CUUCCCUUGUCCU | | 3075296- | 5622-5642 | UTCGCGAGAGGAC | | 3075294-3075316 | 5620-5642 |
| 1640345 | CUCGCGAA | | 3075316 | | AAGGGAAGAC | | | |
| AD- | UUCCCUUGUCCUC | | 3075297- | 5623-5643 | UCUCGCGAGAGG | | 3075295-3075317 | 5621-5643 |
| 1640346 | UCGCGAGA | | 3075317 | | ACAAGGGAAGA | | | |
| AD- | UUCCCUUGUCCUC | | 3075297- | 5623-5643 | UCUCGCGAGAGG | | 3075295-3075317 | 5621-5643 |
| 1640347 | UCGCGAGA | | 3075317 | | ACAAGGGAAGA | | | |
| AD- | UCCCUUGUCCUCU | | 3075298- | 5624-5644 | UCCUCGCGAGAGG | | 3075296-3075318 | 5622-5644 |
| 1640348 | CGCGAGGA | | 3075318 | | ACAAGGGAAG | | | |
| AD- | UCCCUUGUCCUCU | | 3075298- | 5624-5644 | UCCUCGCGAGAGG | | 3075296-3075318 | 5622-5644 |
| 1640349 | CGCGAGGA | | 3075318 | | ACAAGGGAAG | | | |
| AD- | CCCUUGUCCUCUC | | 3075299- | 5625-5645 | UCCCUCGCGAGAG | | 3075297-3075319 | 5623-5645 |
| 1640350 | GCGAGGGA | | 3075319 | | GACAAGGGAA | | | |
| AD- | CCCUUGUCCUCUC | | 3075299- | 5625-5645 | UCCCTCGCGAGAG | | 3075297-3075319 | 5623-5645 |
| 1640351 | GCGAGGGA | | 3075319 | | GACAAGGGAA | | | |
| AD- | CCUGUCCUGAAUU | | 3075339- | 5665-5685 | UCUCGGUGAAUU | | 3075337-3075359 | 5663-5685 |
| 1640352 | CACCGAGA | | 3075359 | | CAGGACAGGCC | | | |
| AD- | CCUGUCCUGAAUU | | 3075339- | 5665-5685 | UCUCGGTGAAUTC | | 3075337-3075359 | 5663-5685 |
| 1640353 | CACCGAGA | | 3075359 | | AGGACAGGCC | | | |
| AD- | CUGUCCUGAAUUC | | 3075340 | 5666-5686 | UCCUCGGUGAAU | | 3075338-3075360 | 5664-5686 |
| 1640354 | ACCGAGGA | | 3075360 | | UCAGGACAGGC | | | |
| AD- | CUGUCCUGAAUUC | | 3075340- | 5666-5686 | UCCUCGGUGAATU | | 3075338-3075360 | 5664-5686 |
| 1640355 | ACCGAGGA | | 3075360 | | CAGGACAGGC | | | |
| AD- | UGUCCUGAAUUC | | 3075341- | 5667-5687 | UCCCUCGGUGAAU | | 3075339-3075361 | 5665-5687 |
| 1640356 | ACCGAGGGA | | 3075361 | | UCAGGACAGG | | | |
| AD- | UGUCCUGAAUUC | | 3075341- | 5667-5687 | UCCCTCGGUGAAU | | 3075339-3075361 | 5665-5687 |
| 1640357 | ACCGAGGGA | | 3075361 | | UCAGGACAGG | | | |
| AD- | UCGCCCUUCGCAG | | 3075381- | 5707-5727 | UUCGCATCCUGCG | | 3075379-3075401 | 5705-5727 |
| 1640358 | GAUGCGAA | | 3075401 | | AAGGGCGAGA | | | |
| AD- | CGCCCUUCGCAGG | | 3075382- | 5708-5728 | UUUCGCAUCCUGC | | 3075380-3075402 | 5706-5728 |
| 1640359 | AUGCGAAA | | 3075402 | | GAAGGGCGAG | | | |
| AD- | GCCCUUCGCAGGA | | 3075383- | 5709-5729 | UCUUCGCAUCCUG | | 3075381-3075403 | 5707-5729 |
| 1640360 | UGCGAAGA | | 3075403 | | CGAAGGGCGA | | | |
| AD- | GCCCUUCGCAGGA | | 3075383- | 5709-5729 | UCUUCGCAUCCTG | | 3075381-3075403 | 5707-5729 |
| 1640361 | UGCGAAGA | | 3075403 | | CGAAGGGCGA | | | |
| AD- | CCUUCGCAGGAUG | | 3075385- | 5711-5731 | UCUCUUCGCAUCC | | 3075383-3075405 | 5709-5731 |
| 1640362 | CGAAGAGA | | 3075405 | | UGCGAAGGGC | | | |
| AD- | CCUUCGCAGGAUG | | 3075385- | 5711-5731 | UCUCTUCGCAUCC | | 3075383-3075405 | 5709-5731 |
| 1640363 | CGAAGAGA | | 3075405 | | UGCGAAGGGC | | | |
| AD- | CUUCGCAGGAUGC | | 3075386- | 5712-5732 | UACUCUTCGCAUC | | 3075384-3075406 | 5710-5732 |
| 1640364 | GAAGAGUA | | 3075406 | | CUGCGAAGGG | | | |
| AD- | UUCGCAGGAUGC | | 3075387- | 5713-5733 | UAACTCTUCGCAU | | 3075385-3075407 | 5711-5733 |
| 1640365 | GAAGAGUUA | | 3075407 | | CCUGCGAAGG | | | |
| AD- | UCGCAGGAUGCG | | 3075388- | 5714-5734 | UCAACUCUUCGCA | | 3075386-3075408 | 5712-5734 |
| 1640366 | AAGAGUUGA | | 3075408 | | UCCUGCGAAG | | | |
| AD- | UCGCAGGAUGCG | | 3075388- | 5714-5734 | UCAACUCUUCGCA | | 3075386-3075408 | 5712-5734 |
| 1640367 | AAGAGUUGA | | 3075408 | | UCCUGCGAAG | | | |
| AD- | CGCAGGAUGCGA | | 3075389- | 5715-5735 | UCCAACUCUUCGC | | 3075387-3075409 | 5713-5735 |
| 1640368 | AGAGUUGGA | | 3075409 | | AUCCUGCGAA | | | |
| AD- | CGCAGGAUGCGA | | 3075389- | 5715-5735 | UCCAACTCUUCGC | | 3075387-3075409 | 5713-5735 |
| 1640369 | AGAGUUGGA | | 3075409 | | AUCCUGCGAA | | | |
| AD- | GCAGGAUGCGAA | | 3075390- | 5716-5736 | UCCCAACUCUUCG | | 3075388-3075410 | 5714-5736 |
| 1640370 | GAGUUGGGA | | 3075410 | | CAUCCUGCGA | | | |
| AD- | GCAGGAUGCGAA | | 3075390- | 5716-5736 | UCCCAACUCUUCG | | 3075388-3075410 | 5714-5736 |
| 1640371 | GAGUUGGGA | | 3075410 | | CAUCCUGCGA | | | |
| AD- | AUUUGCGAGAAA | | 3075430- | 5756-5776 | UCGCCCTGGUUUC | | 3075428-3075450 | 5754-5776 |
| 1640372 | CCAGGGCGA | | 3075450 | | UCGCAAAUAA | | | |
| AD- | AUUUGCGAGAAA | | 3075430- | 5756-5776 | UCGCCCUGGUUUC | | 3075428-3075450 | 5754-5776 |
| 1640373 | CCAGGGCGA | | 3075450 | | UCGCAAAUAA | | | |
| AD- | AUUUGCGAGAAA | | 3075430- | 5756-5776 | UCGCCCTGGUUTC | | 3075428-3075450 | 5754-5776 |
| 1640374 | CCAGGGCGA | | 3075450 | | UCGCAAAUAA | | | |
| AD- | UUUGCGAGAAAC | | 3075431- | 5757-5777 | UCCGCCCUGGUUU | | 3075429-3075451 | 5755-5777 |
| 1640375 | CAGGGCGGA | | 3075451 | | CUCGCAAAUA | | | |
| AD- | UUUGCGAGAAAC | | 3075431- | 5757-5777 | UCCGCCCUGGUTU | | 3075429-3075451 | 5755-5777 |
| 1640376 | CAGGGCGGA | | 3075451 | | CUCGCAAAUA | | | |
| AD- | UUGCGAGAAACC | | 3075432- | 5758-5778 | UCCCGCCCUGGUU | | 3075430-3075452 | 5756-5778 |
| 1640377 | AGGGCGGGA | | 3075452 | | UCUCGCAAAU | | | |
| AD- | UUGCGAGAAACC | | 3075432- | 5758-5778 | UCCCGCCCUGGTU | | 3075430-3075452 | 5756-5778 |
| 1640378 | AGGGCGGGA | | 3075452 | | UCUCGCAAAU | | | |
| AD- | UAACUGCGUUGU | | 3075460- | 5786-5806 | UUUCTCTUCACAA | | 3075458-3075480 | 5784-5806 |
| 1640379 | GAAGAGAAA | | 3075480 | | CGCAGUUAAA | | | |
| AD- | ACUGCGUUGUGA | | 3075462- | 5788-5808 | UAGUTCTCUUCAC | | 3075460-3075482 | 5786-5808 |
| 1640380 | AGAGAACUA | | 3075482 | | AACGCAGUUA | | | |
| AD- | UGCGUUGUGAAG | | 3075464- | 5790-5810 | UCAAGUTCUCUUC | | 3075462-3075484 | 5788-5810 |
| 1640381 | AGAACUUGA | | 3075484 | | ACAACGCAGU | | | |
| AD- | UGCGUUGUGAAG | | 3075464- | 5790-5810 | UCAAGUUCUCUUC | | 3075462-3075484 | 5788-5810 |
| 1640382 | AGAACUUGA | | 3075484 | | ACAACGCAGU | | | |
| AD- | UGCGUUGUGAAG | | 3075464- | 5790-5810 | UCAAGUTCUCUTC | | 3075462-3075484 | 5788-5810 |
| 1640383 | AGAACUUGA | | 3075484 | | ACAACGCAGU | | | |
| AD | GCGUUGUGAAGA | | 3075465- | 5791-5811 | UCCAAGUUCUCUU | | 3075463-3075485 | 5789-5811 |
| 1640384 | GAACUUGGA | | 3075485 | | CACAACGCAG | | | |
| AD- | GCGUUGUGAAGA | | 3075465- | 5791-5811 | UCCAAGTUCUCTU | | 3075463-3075485 | 5789-5811 |
| 1640385 | GAACUUGGA | | 3075485 | | CACAACGCAG | | | |
| AD- | GUUGUGAAGAGA | | 3075467- | 5793-5813 | UCUCCAAGUUCUC | | 3075465-3075487 | 5791-5813 |
| 1640386 | ACUUGGAGA | | 3075487 | | UUCACAACGC | | | |
| AD- | GUUGUGAAGAGA | | 3075467- | 5793-5813 | UCUCCAAGUUCTC | | 3075465-3075487 | 5791-5813 |
| 1640387 | ACUUGGAGA | | 3075487 | | UUCACAACGC | | | |
| AD | GUGAAGAGAACU | | 3075470- | 5796-5816 | UCUCCUCCAAGUU | | 3075468-3075490 | 5794-5816 |
| 1640388 | UGGAGGAGA | | 3075490 | | CUCUUCACAA | | | |
| AD- | GUGAAGAGAACU | | 3075470- | 5796-5816 | UCUCCUCCAAGTU | | 3075468-3075490 | 5794-5816 |
| 1640389 | UGGAGGAGA | | 3075490 | | CUCUUCACAA | | | |
| AD- | UGAAGAGAACUU | | 3075471- | 5797-5817 | UGCUCCTCCAAGU | | 3075469-3075491 | 5795-5817 |
| 1640390 | GGAGGAGCA | | 3075491 | | UCUCUUCACA | | | |
| AD- | AGAGAACUUGGA | | 3075474- | 5800-5820 | UUCGGCTCCUCCA | | 3075472-3075494 | 5798-5820 |
| 1640391 | GGAGCCGAA | | 3075494 | | AGUUCUCUUC | | | |
| AD- | GAGAACUUGGAG | | 3075475- | 5801-5821 | UCUCGGCUCCUCC | | 3075473-3075495 | 5799-5821 |
| 1640392 | GAGCCGAGA | | 3075495 | | AAGUUCUCUU | | | |
| AD- | GAGAACUUGGAG | | 3075475- | 5801-5821 | UCUCGGCUCCUCC | | 3075473-3075495 | 5799-5821 |
| 1640393 | GAGCCGAGA | | 3075495 | | AAGUUCUCUU | | | |
| AD- | CUUGGAGGAGCC | | 3075480- | 5806-5826 | UCAAAUCUCGGCU | | 3075478-3075500 | 5804-5826 |
| 1640394 | GAGAUUUGA | | 3075500 | | CCUCCAAGUU | | | |
| AD- | CUUGGAGGAGCC | | 3075480- | 5806-5826 | UCAAAUCUCGGCU | | 3075478-3075500 | 5804-5826 |
| 1640395 | GAGAUUUGA | | 3075500 | | CCUCCAAGUU | | | |
| AD- | UUGGAGGAGCCG | | 3075481- | 5807-5827 | UGCAAAUCUCGGC | | 3075479-3075501 | 5805-5827 |
| 1640396 | AGAUUUGCA | | 3075501 | | UCCUCCAAGU | | | |
| AD- | UUGGAGGAGCCG | | 3075481- | 5807-5827 | UGCAAATCUCGGC | | 3075479-3075501 | 5805-5827 |
| 1640397 | AGAUUUGCA | | 3075501 | | UCCUCCAAGU | | | |
| AD- | UGGAGGAGCCGA | | 3075482- | 5808-5828 | UAGCAAAUCUCG | | 3075480-3075502 | 5806-5828 |
| 1640398 | GAUUUGCUA | | 3075502 | | GCUCCUCCAAG | | | |
| AD- | UGGAGGAGCCGA | | 3075482- | 5808-5828 | UAGCAAAUCUCG | | 3075480-3075502 | 5806-5828 |
| 1640399 | GAUUUGCUA | | 3075502 | | GCUCCUCCAAG | | | |
| AD- | GGAGGAGCCGAG | | 3075483- | 5809-5829 | UGAGCAAAUCUC | | 3075481-3075503 | 5807-5829 |
| 1640400 | AUUUGCUCA | | 3075503 | | GGCUCCUCCAA | | | |
| AD- | GGAGGAGCCGAG | | 3075483- | 5809-5829 | UGAGCAAAUCUC | | 3075481-3075503 | 5807-5829 |
| 1640401 | AUUUGCUCA | | 3075503 | | GGCUCCUCCAA | | | |
| AD- | GGAGGAGCCGAG | | 3075483- | 5809-5829 | UGAGCAAAUCUC | | 3075481-3075503 | 5807-5829 |
| 1640402 | AUUUGCUCA | | 3075503 | | GGCUCCUCCAA | | | |
| AD- | GAGGAGCCGAGA | | 3075484- | 5810-5830 | UUGAGCAAAUCU | | 3075482-3075504 | 5808-5830 |
| 1640403 | UUUGCUCAA | | 3075504 | | CGGCUCCUCCA | | | |
| AD- | GAGCCGAGAUUU | | 3075487- | 5813-5833 | UCACTGAGCAAAU | | 3075485-3075507 | 5811-5833 |
| 1640404 | GCUCAGUGA | | 3075507 | | CUCGGCUCCU | | | |
| AD- | GCCGAGAUUUGC | | 3075489- | 5815-5835 | UGGCACTGAGCAA | | 3075487-3075509 | 5813-5835 |
| 1640405 | UCAGUGCCA | | 3075509 | | AUCUCGGCUC | | | |
| AD- | CGAGAUUUGCUC | | 3075491- | 5817-5837 | UGUGGCACUGAG | | 3075489-3075511 | 5815-5837 |
| 1640406 | AGUGCCACA | | 3075511 | | CAAAUCUCGGC | | | |
| AD- | AUUUGCUCAGUG | | 3075495- | 5821-5841 | UGGAAGTGGCACU | | 3075493-3075515 | 5819-5841 |
| 1640407 | CCACUUCCA | | 3075515 | | GAGCAAAUCU | | | |
| AD- | UUGCUCAGUGCCA | | 3075497- | 5823-5843 | UAGGGAAGUGGC | | 3075495-3075517 | 5821-5843 |
| 1640408 | CUUCCCUA | | 3075517 | | ACUGAGCAAAU | | | |
| AD- | UUGCUCAGUGCCA | | 3075497- | 5823-5843 | UAGGGAAGUGGC | | 3075495-3075517 | 5821-5843 |
| 1640409 | CUUCCCUA | | 3075517 | | ACUGAGCAAAU | | | |
| AD- | UUGCUCAGUGCCA | | 3075497- | 5823-5843 | UAGGGAAGUGGC | | 3075495-3075517 | 5821-5843 |
| 1640410 | CUUCCCUA | | 3075517 | | ACUGAGCAAAU | | | |
| AD- | UGCUCAGUGCCAC | | 3075498- | 5824-5844 | UGAGGGAAGUGG | | 3075496-3075518 | 5822-5844 |
| 1640411 | UUCCCUCA | | 3075518 | | CACUGAGCAAA | | | |
| AD- | UGCUCAGUGCCAC | | 3075498- | 5824-5844 | UGAGGGAAGUGG | | 3075496-3075518 | 5822-5844 |
| 1640412 | UUCCCUCA | | 3075518 | | CACUGAGCAAA | | | |
| AD- | UGCUCAGUGCCAC | | 3075498- | 5824-5844 | UGAGGGAAGUGG | | 3075496-3075518 | 5822-5844 |
| 1640413 | UUCCCUCA | | 3075518 | | CACUGAGCAAA | | | |
| AD- | AGUGCCACUUCCC | | 3075503- | 5829-5849 | UUAGAAGAGGGA | | 3075501-3075523 | 5827-5849 |
| 1640414 | UCUUCUAA | | 3075523 | | AGUGGCACUGA | | | |
| AD- | AGUGCCACUUCCC | | 3075503- | 5829-5849 | UTAGAAGAGGGA | | 3075501-3075523 | 5827-5849 |
| 1640415 | UCUUCUAA | | 3075523 | | AGUGGCACUGA | | | |
| AD- | GCCACUUCCCUCU | | 3075506- | 5832-5852 | UGACUAGAAGAG | | 3075504-3075526 | 5830-5852 |
| 1640416 | UCUAGUCA | | 3075526 | | GGAAGUGGCAC | | | |
| AD- | GCCACUUCCCUCU | | 3075506- | 5832-5852 | UGACTAGAAGAG | | 3075504-3075526 | 5830-5852 |
| 1640417 | UCUAGUCA | | 3075526 | | GGAAGUGGCAC | | | |
| AD- | CCACUUCCCUCUU | | 3075507- | 5833-5853 | UAGACUAGAAGA | | 3075505-3075527 | 5831-5853 |
| 1640418 | CUAGUCUA | | 3075527 | | GGGAAGUGGCA | | | |
| AD- | CCACUUCCCUCUU | | 3075507- | 5833-5853 | UAGACUAGAAGA | | 3075505-3075527 | 5831-5853 |
| 1640419 | CUAGUCUA | | 3075527 | | GGGAAGUGGCA | | | |
| AD- | CCACUUCCCUCUU | | 3075507- | 5833-5853 | UAGACUAGAAGA | | 3075505-3075527 | 5831-5853 |
| 1640420 | CUAGUCUA | | 3075527 | | GGGAAGUGGCA | | | |
| AD- | CACUUCCCUCUUC | | 3075508- | 5834-5854 | UCAGACTAGAAGA | | 3075506-3075528 | 5832-5854 |
| 1640421 | UAGUCUGA | | 3075528 | | GGGAAGUGGC | | | |
| AD- | CACUUCCCUCUUC | | 3075508- | 5834-5854 | UCAGACUAGAAG | | 3075506-3075528 | 5832-5854 |
| 1640422 | UAGUCUGA | | 3075528 | | AGGGAAGUGGC | | | |
| AD- | CACUUCCCUCUUC | | 3075508- | 5834-5854 | UCAGACTAGAAGA | | 3075506-3075528 | 5832-5854 |
| 1640429 | UAGUCUGA | | 3075528 | | GGGAAGUGGC | | | |
| AD- | ACUUCCCUCUUCU | | 3075509- | 5835-5855 | UUCAGACUAGAA | | 3075507-3075529 | 5833-5855 |
| 1640430 | AGUCUGAA | | 3075529 | | GAGGGAAGUGG | | | |
| AD- | CUUCCCUCUUCUA | | 3075510- | 5836-5856 | UCUCAGACUAGA | | 3075508-3075530 | 5834-5856 |
| 1640431 | GUCUGAGA | | 3075530 | | AGAGGGAAGUG | | | |
| AD- | CUUCCCUCUUCUA | | 3075510- | 5836-5856 | UCUCAGACUAGA | | 3075508-3075530 | 5834-5856 |
| 1640432 | GUCUGAGA | | 3075530 | | AGAGGGAAGUG | | | |
| AD- | CUUCCCUCUUCUA | | 3075510- | 5836-5856 | UCUCAGACUAGA | | 3075508-3075530 | 5834-5856 |
| 1640433 | GUCUGAGA | | 3075530 | | AGAGGGAAGUG | | | |
| AD- | UCCCUCUUCUAGU | | 3075512- | 5838-5858 | UCUCTCAGACUAG | | 3075510-3075532 | 5836-5858 |
| 1640434 | CUGAGAGA | | 3075532 | | AAGAGGGAAG | | | |
| AD- | CCUCUUCUAGUCU | | 3075514- | 5840-5860 | UCCCTCTCAGACU | | 3075512-3075534 | 5838-5860 |
| 1640435 | GAGAGGGA | | 3075534 | | AGAAGAGGGA | | | |
| AD- | CCUCUUCUAGUCU | | 3075514- | 5840-5860 | UCCCUCUCAGACU | | 3075512-3075534 | 5838-5860 |
| 1640436 | GAGAGGGA | | 3075534 | | AGAAGAGGGA | | | |
| AD- | CCUCUUCUAGUCU | | 3075514- | 5840-5860 | UCCCTCTCAGACU | | 3075512-3075534 | 5838-5860 |
| 1640437 | GAGAGGGA | | 3075534 | | AGAAGAGGGA | | | |
| AD- | UCUUCUAGUCUG | | 3075516- | 5842-5862 | UUUCCCTCUCAGA | | 3075514-3075536 | 5840-5862 |
| 1640438 | AGAGGGAAA | | 3075536 | | CUAGAAGAGG | | | |
| AD- | CUUCUAGUCUGA | | 3075517- | 5843-5863 | UCUUCCCUCUCAG | | 3075515-3075537 | 5841-5863 |
| 1640439 | GAGGGAAGA | | 3075537 | | ACUAGAAGAG | | | |
| AD- | CUUCUAGUCUGA | | 3075517- | 5843-5863 | UCUUCCCUCUCAG | | 3075515-3075537 | 5841-5863 |
| 1640440 | GAGGGAAGA | | 3075537 | | ACUAGAAGAG | | | |
| AD- | UCUAGUCUGAGA | | 3075519- | 5845-5865 | UCUCUUCCCUCUC | | 3075517-3075539 | 5843-5865 |
| 1640441 | GGGAAGAGA | | 3075539 | | AGACUAGAAG | | | |
| AD- | UCUAGUCUGAGA | | 3075519- | 5845-5865 | UCUCTUCCCUCTC | | 3075517-3075539 | 5843-5865 |
| 1640442 | GGGAAGAGA | | 3075539 | | AGACUAGAAG | | | |
| AD- | CUAGUCUGAGAG | | 3075520- | 5846-5866 | UCCUCUTCCCUCU | | 3075518-3075540 | 5844-5866 |
| 1640443 | GGAAGAGGA | | 3075540 | | CAGACUAGAA | | | |
| AD- | CUAGUCUGAGAG | | 3075520- | 5846-5866 | UCCUCUUCCCUCU | | 3075518-3075540 | 5844-5866 |
| 1640444 | GGAAGAGGA | | 3075540 | | CAGACUAGAA | | | |
| AD- | CUAGUCUGAGAG | | 3075520- | 5846-5866 | UCCUCUTCCCUCU | | 3075518-3075540 | 5844-5866 |
| 1640445 | GGAAGAGGA | | 3075540 | | CAGACUAGAA | | | |
| AD- | UAGUCUGAGAGG | | 3075521- | 5847-5867 | UCCCTCTUCCCUC | | 3075519-3075541 | 5845-5867 |
| 1640446 | GAAGAGGGA | | 3075541 | | UCAGACUAGA | | | |
| AD- | UAGUCUGAGAGG | | 3075521- | 5847-5867 | UCCCUCUUCCCUC | | 3075519-3075541 | 5845-5867 |
| 1640447 | GAAGAGGGA | | 3075541 | | UCAGACUAGA | | | |
| AD- | GUCUGAGAGGGA | | 3075523- | 5849-5869 | UAGCCCTCUUCCC | | 3075521-3075543 | 5847-5869 |
| 1640448 | AGAGGGCUA | | 3075543 | | UCUCAGACUA | | | |
| AD- | UCUGAGAGGGAA | | 3075524- | 5850-5870 | UCAGCCCUCUUCC | | 3075522-3075544 | 5848-5870 |
| 1640449 | GAGGGCUGA | | 3075544 | | CUCUCAGACU | | | |
| AD- | UCUGAGAGGGAA | | 3075524- | 5850-5870 | UCAGCCCUCUUCC | | 3075522-3075544 | 5848-5870 |
| 1640450 | GAGGGCUGA | | 3075544 | | CUCUCAGACU | | | |
| AD- | CUGAGAGGGAAG | | 3075525- | 5851-5871 | UCCAGCCCUCUUC | | 3075523-3075545 | 5849-5871 |
| 1640451 | AGGGCUGGA | | 3075545 | | CCUCUCAGAC | | | |
| AD- | CUGAGAGGGAAG | | 3075525- | 5851-5871 | UCCAGCCCUCUTC | | 3075523-3075545 | 5849-5871 |
| 1640452 | AGGGCUGGA | | 3075545 | | CCUCUCAGAC | | | |
| AD- | UUUGGAGCUGGA | | 3075575- | 5901-5921 | UCACAUCUCUCCA | | 3075573-3075595 | 5899-5921 |
| 1640453 | GAGAUGUGA | | 3075595 | | GCUCCAAACC | | | |
| AD- | UUUGGAGCUGGA | | 3075575- | 5901-5921 | UCACAUCUCUCCA | | 3075573-3075595 | 5899-5921 |
| 1640454 | GAGAUGUGA | | 3075595 | | GCUCCAAACC | | | |
| AD- | UUGGAGCUGGAG | | 3075576- | 5902-5922 | UCCACAUCUCUCC | | 3075574-3075596 | 5900-5922 |
| 1640455 | AGAUGUGGA | | 3075596 | | AGCUCCAAAC | | | |
| AD- | UUGGAGCUGGAG | | 3075576- | 5902-5922 | UCCACATCUCUCC | | 3075574-3075596 | 5900-5922 |
| 1640456 | AGAUGUGGA | | 3075596 | | AGCUCCAAAC | | | |
| AD- | GCAGUGGAUGAC | | 3075598- | 5924-5944 | UAGCAUUAUGUC | | 3075596-3075618 | 5922-5944 |
| 1640457 | AUAAUGCUA | | 3075618 | | AUCCACUGCCC | | | |
| AD- | GCAGUGGAUGAC | | 3075598- | 5924-5944 | UAGCAUTAUGUCA | | 3075596-3075618 | 5922-5944 |
| 1640458 | AUAAUGCUA | | 3075618 | | UCCACUGCCC | | | |
| AD- | CAGUGGAUGACA | | 3075599- | 5925-5945 | UAAGCATUAUGUC | | 3075597-3075619 | 5923-5945 |
| 1640459 | UAAUGCUUA | | 3075619 | | AUCCACUGCC | | | |
| AD- | CAGUGGAUGACA | | 3075599- | 5925-5945 | UAAGCAUUAUGU | | 3075597-3075619 | 5923-5945 |
| 1640460 | UAAUGCUUA | | 3075619 | | CAUCCACUGCC | | | |
| AD- | CAGUGGAUGACA | | 3075599- | 5925-5945 | UAAGCATUAUGTC | | 3075597-3075619 | 5923-5945 |
| 1640461 | UAAUGCUUA | | 3075619 | | AUCCACUGCC | | | |
| AD- | UAGGACGCCUCGG | | 3075620- | 5946-5966 | UACUCCCGCCGAG | | 3075618-3075640 | 5944-5966 |
| 1640462 | CGGGAGUA | | 3075640 | | GCGUCCUAAA | | | |
| AD- | UGAGGGCGCGUCC | | 3075665- | 5991-6011 | UUCCCATUGGACG | | 3075663-3075685 | 5989-6011 |
| 1640463 | AAUGGGAA | | 3075685 | | CGCCCUCACU | | | |
| AD- | UGAGGGCGCGUCC | | 3075665- | 5991-6011 | UUCCCAUUGGACG | | 3075663-3075685 | 5989-6011 |
| 1640464 | AAUGGGAA | | 3075685 | | CGCCCUCACU | | | |
| AD- | UGAGGGCGCGUCC | | 3075665- | 5991-6011 | UTCCCATUGGACG | | 3075663-3075685 | 5989-6011 |
| 1640465 | AAUGGGAA | | 3075685 | | CGCCCUCACU | | | |
| AD- | GCGUCCAAUGGG | | 3075672- | 5998-6018 | UAGAAATCUCCCA | | 3075670-3075692 | 5996-6018 |
| 1640466 | AGAUUUCUA | | 3075692 | | UUGGACGCGC | | | |
| AD- | GCGUCCAAUGGG | | 3075672- | 5998-6018 | UAGAAAUCUCCCA | | 3075670-3075692 | 5996-6018 |
| 1640467 | AGAUUUCUA | | 3075692 | | UUGGACGCGC | | | |
| AD- | GCGUCCAAUGGG | | 3075672- | 5998-6018 | UAGAAATCUCCCA | | 3075670-3075692 | 5996-6018 |
| 1640468 | AGAUUUCUA | | 3075692 | | UUGGACGCGC | | | |
| AD- | CGUCCAAUGGGA | | 3075673- | 5999-6019 | UAAGAAAUCUCCC | | 3075671-3075693 | 5997-6019 |
| 1640469 | GAUUUCUUA | | 3075693 | | AUUGGACGCG | | | |
| AD- | CGUCCAAUGGGA | | 3075673- | 5999-6019 | UAAGAAAUCUCCC | | 3075671-3075693 | 5997-6019 |
| 1640470 | GAUUUCUUA | | 3075693 | | AUUGGACGCG | | | |
| AD- | CAGCCUGAGAUU | | 3075712- | 6038-6058 | UGAGCCTCAAAUC | | 3075710-3075732 | 6036-6058 |
| 1640471 | UGAGGCUCA | | 3075732 | | UCAGGCUGUU | | | |
| AD- | CUGAGAUUUGAG | | 3075716- | 6042-6062 | UGGAAGAGCCUC | | 3075714-3075736 | 6040-6062 |
| 1640472 | GCUCUUCCA | | 3075736 | | AAAUCUCAGGC | | | |
| AD- | UGAGAUUUGAGG | | 3075717- | 6043-6063 | UAGGAAGAGCCU | | 3075715-3075737 | 6041-6063 |
| 1640473 | CUCUUCCUA | | 3075737 | | CAAAUCUCAGG | | | |
| AD- | UGAGAUUUGAGG | | 3075717- | 6043-6063 | UAGGAAGAGCCTC | | 3075715-3075737 | 6041-6063 |
| 1640474 | CUCUUCCUA | | 3075737 | | AAAUCUCAGG | | | |
| AD- | GAGAUUUGAGGC | | 3075718- | 6044-6064 | UUAGGAAGAGCC | | 3075716-3075738 | 6042-6064 |
| 1640475 | UCUUCCUAA | | 3075738 | | UCAAAUCUCAG | | | |
| AD- | GAGAUUUGAGGC | | 3075718- | 6044-6064 | UUAGGAAGAGCC | | 3075716-3075738 | 6042-6064 |
| 1640476 | UCUUCCUAA | | 3075738 | | UCAAAUCUCAG | | | |
| AD- | GAGAUUUGAGGC | | 3075718- | 6044-6064 | UTAGGAAGAGCCU | | 3075716-3075738 | 6042-6064 |
| 1640477 | UCUUCCUAA | | 3075738 | | CAAAUCUCAG | | | |
| AD- | AGAUUUGAGGCU | | 3075719- | 6045-6065 | UGUAGGAAGAGC | | 3075717-3075739 | 6043-6065 |
| 1640478 | CUUCCUACA | | 3075739 | | CUCAAAUCUCA | | | |
| AD- | UUUGAGGCUCUU | | 3075722- | 6048-6068 | UAAUGUAGGAAG | | 3075720-3075742 | 6046-6068 |
| 1640479 | CCUACAUUA | | 3075742 | | AGCCUCAAAUC | | | |
| AD- | UGAGGCUCUUCCU | | 3075724- | 6050-6070 | UACAAUGUAGGA | | 3075722-3075744 | 6048-6070 |
| 1640480 | ACAUUGUA | | 3075744 | | AGAGCCUCAAA | | | |
| AD- | UGAGGCUCUUCCU | | 3075724- | 6050-6070 | UACAAUGUAGGA | | 3075722-3075744 | 6048-6070 |
| 1640481 | ACAUUGUA | | 3075744 | | AGAGCCUCAAA | | | |
| AD- | GAGGCUCUUCCUA | | 3075725- | 6051-6071 | UGACAAUGUAGG | | 3075723-3075745 | 6049-6071 |
| 1640482 | CAUUGUCA | | 3075745 | | AAGAGCCUCAA | | | |
| AD- | GAGGCUCUUCCUA | | 3075725- | 6051-6071 | UGACAATGUAGG | | 3075723-3075745 | 6049-6071 |
| 1640483 | CAUUGUCA | | 3075745 | | AAGAGCCUCAA | | | |
| AD- | AGGCUCUUCCUAC | | 3075726- | 6052-6072 | UUGACAAUGUAG | | 3075724-3075746 | 6050-6072 |
| 1640484 | AUUGUCAA | | 3075746 | | GAAGAGCCUCA | | | |
| AD- | AGGCUCUUCCUAC | | 3075726- | 6052-6072 | UUGACAAUGUAG | | 3075724-3075746 | 6050-6072 |
| 1640485 | AUUGUCAA | | 3075746 | | GAAGAGCCUCA | | | |
| AD- | AGGCUCUUCCUAC | | 3075726- | 6052-6072 | UTGACAAUGUAG | | 3075724-3075746 | 6050-6072 |
| 1640486 | AUUGUCAA | | 3075746 | | GAAGAGCCUCA | | | |
| AD- | GGCUCUUCCUACA | | 3075727- | 6053-6073 | UCUGACAAUGUA | | 3075725-3075747 | 6051-6073 |
| 1640487 | UUGUCAGA | | 3075747 | | GGAAGAGCCUC | | | |
| AD- | GGCUCUUCCUACA | | 3075727- | 6053-6073 | UCUGACAAUGUA | | 3075725-3075747 | 6051-6073 |
| 1640488 | UUGUCAGA | | 3075747 | | GGAAGAGCCUC | | | |
| AD- | GCUCUUCCUACAU | | 3075728- | 6054-6074 | UCCUGACAAUGU | | 3075726-3075748 | 6052-6074 |
| 1640489 | UGUCAGGA | | 3075748 | | AGGAAGAGCCU | | | |
| AD- | GCUCUUCCUACAU | | 3075728- | 6054-6074 | UCCUGACAAUGTA | | 3075726-3075748 | 6052-6074 |
| 1640490 | UGUCAGGA | | 3075748 | | GGAAGAGCCU | | | |
| AD- | CUCUUCCUACAUU | | 3075729- | 6055-6075 | UUCCTGACAAUGU | | 3075727-3075749 | 6053-6075 |
| 1640491 | GUCAGGAA | | 3075749 | | AGGAAGAGCC | | | |
| AD- | CUUCCUACAUUGU | | 3075731- | 6057-6077 | UUGUCCTGACAAU | | 3075729-3075751 | 6055-6077 |
| 1640492 | CAGGACAA | | 3075751 | | GUAGGAAGAG | | | |
| AD- | UACAUUGUCAGG | | 3075736- | 6062-6082 | UUGAAATGUCCUG | | 3075734-3075756 | 6060-6082 |
| 1640493 | ACAUUUCAA | | 3075756 | | ACAAUGUAGG | | | |
| AD- | UACAUUGUCAGG | | 3075736- | 6062-6082 | UUGAAAUGUCCU | | 3075734-3075756 | 6060-6082 |
| 1640494 | ACAUUUCAA | | 3075756 | | GACAAUGUAGG | | | |
| AD- | UACAUUGUCAGG | | 3075736- | 6062-6082 | UTGAAATGUCCTG | | 3075734-3075756 | 6060-6082 |
| 1640495 | ACAUUUCAA | | 3075756 | | ACAAUGUAGG | | | |
| AD- | ACAUUGUCAGGA | | 3075737- | 6063-6083 | UAUGAAAUGUCC | | 3075735-3075757 | 6061-6083 |
| 1640496 | CAUUUCAUA | | 3075757 | | UGACAAUGUAG | | | |
| AD- | ACAUUGUCAGGA | | 3075737- | 6063-6083 | UAUGAAAUGUCC | | 3075735-3075757 | 6061-6083 |
| 1640497 | CAUUUCAUA | | 3075757 | | UGACAAUGUAG | | | |
| AD- | CAUUGUCAGGAC | | 3075738- | 6064-6084 | UAAUGAAAUGUC | | 3075736-3075758 | 6062-6084 |
| 1640498 | AUUUCAUUA | | 3075758 | | CUGACAAUGUA | | | |
| AD- | CAUUGUCAGGAC | | 3075738- | 6064-6084 | UAAUGAAAUGUC | | 3075736-3075758 | 6062-6084 |
| 1640499 | AUUUCAUUA | | 3075758 | | CUGACAAUGUA | | | |
| AD- | UUGUCAGGACAU | | 3075740- | 6066-6086 | UUAAAUGAAAUG | | 3075738-3075760 | 6064-6086 |
| 1640500 | UUCAUUUAA | | 3075760 | | UCCUGACAAUG | | | |
| AD- | UUGUCAGGACAU | | 3075740- | 6066-6086 | UTAAAUGAAAUG | | 3075738-3075760 | 6064-6086 |
| 1640501 | UUCAUUUAA | | 3075760 | | UCCUGACAAUG | | | |
| AD- | UCAGGACAUUUC | | 3075743- | 6069-6089 | UAACUAAAUGAA | | 3075741-3075763 | 6067-6089 |
| 1640502 | AUUUAGUUA | | 3075763 | | AUGUCCUGACA | | | |
| AD- | UCAGGACAUUUC | | 3075743- | 6069-6089 | UAACTAAAUGAA | | 3075741-3075763 | 6067-6089 |
| 1640503 | AUUUAGUUA | | 3075763 | | AUGUCCUGACA | | | |
| AD- | CAGGACAUUUCA | | 3075744- | 6070-6090 | UGAACUAAAUGA | | 3075742-3075764 | 6068-6090 |
| 1640504 | UUUAGUUCA | | 3075764 | | AAUGUCCUGAC | | | |
| AD- | CAGGACAUUUCA | | 3075744- | 6070-6090 | UGAACUAAAUGA | | 3075742-3075764 | 6068-6090 |
| 1640505 | UUUAGUUCA | | 3075764 | | AAUGUCCUGAC | | | |
| AD- | AGGACAUUUCAU | | 3075745- | 6071-6091 | UUGAACTAAAUG | | 3075743-3075765 | 6069-6091 |
| 1640506 | UUAGUUCAA | | 3075765 | | AAAUGUCCUGA | | | |
| AD- | GGACAUUUCAUU | | 3075746- | 6072-6092 | UAUGAACUAAAU | | 3075744-3075766 | 6070-6092 |
| 1640507 | UAGUUCAUA | | 3075766 | | GAAAUGUCCUG | | | |
| AD- | GGACAUUUCAUU | | 3075746- | 6072-6092 | UAUGAACUAAAT | | 3075744-3075766 | 6070-6092 |
| 1640508 | UAGUUCAUA | | 3075766 | | GAAAUGUCCUG | | | |
| AD- | ACAUUUCAUUUA | | 3075748- | 6074-6094 | UUCATGAACUAAA | | 3075746-3075768 | 6072-6094 |
| 1640509 | GUUCAUGAA | | 3075768 | | UGAAAUGUCC | | | |
| AD- | ACAUUUCAUUUA | | 3075748- | 6074-6094 | UUCAUGAACUAA | | 3075746-3075768 | 6072-6094 |
| 1640510 | GUUCAUGAA | | 3075768 | | AUGAAAUGUCC | | | |
| AD- | UUUCAUUUAGUU | | 3075751- | 6077-6097 | UUGATCAUGAACU | | 3075749-3075771 | 6075-6097 |
| 1640511 | CAUGAUCAA | | 3075771 | | AAAUGAAAUG | | | |
| AD- | UCAUUUAGUUCA | | 3075753- | 6079-6099 | UCGUGATCAUGAA | | 3075751-3075773 | 6077-6099 |
| 1640512 | UGAUCACGA | | 3075773 | | CUAAAUGAAA | | | |
| AD- | UCAUUUAGUUCA | | 3075753- | 6079-6099 | UCGUGAUCAUGA | | 3075751-3075773 | 6077-6099 |
| 1640513 | UGAUCACGA | | 3075773 | | ACUAAAUGAAA | | | |
| AD- | CAUUUAGUUCAU | | 3075754- | 6080-6100 | UCCGTGAUCAUGA | | 3075752-3075774 | 6078-6100 |
| 1640514 | GAUCACGGA | | 3075774 | | ACUAAAUGAA | | | |
| AD- | CAUUUAGUUCAU | | 3075754- | 6080-6100 | UCCGUGAUCAUG | | 3075752-3075774 | 6078-6100 |
| 1640515 | GAUCACGGA | | 3075774 | | AACUAAAUGAA | | | |
| AD- | CAUUUAGUUCAU | | 3075754- | 6080-6100 | UCCGTGAUCAUGA | | 3075752-3075774 | 6078-6100 |
| 1640516 | GAUCACGGA | | 3075774 | | ACUAAAUGAA | | | |
| AD- | AUUUAGUUCAUG | | 3075755- | 6081-6101 | UACCGUGAUCAU | | 3075753-3075775 | 6079-6101 |
| 1640517 | AUCACGGUA | | 3075775 | | GAACUAAAUGA | | | |
| AD- | AUUUAGUUCAUG | | 3075755- | 6081-6101 | UACCGUGAUCATG | | 3075753-3075775 | 6079-6101 |
| 1640518 | AUCACGGUA | | 3075775 | | AACUAAAUGA | | | |
| AD- | UUUAGUUCAUGA | | 3075756- | 6082-6102 | UCACCGUGAUCAU | | 3075754-3075776 | 6080-6102 |
| 1640519 | UCACGGUGA | | 3075776 | | GAACUAAAUG | | | |
| AD- | UUUAGUUCAUGA | | 3075756- | 6082-6102 | UCACCGTGAUCAU | | 3075754-3075776 | 6080-6102 |
| 1640520 | UCACGGUGA | | 3075776 | | GAACUAAAUG | | | |
| AD- | UUAGUUCAUGAU | | 3075757- | 6083-6103 | UCCACCGUGAUCA | | 3075755-3075777 | 6081-6103 |
| 1640521 | CACGGUGGA | | 3075777 | | UGAACUAAAU | | | |
| AD- | UUAGUUCAUGAU | | 3075757- | 6083-6103 | UCCACCGUGAUCA | | 3075755-3075777 | 6081-6103 |
| 1640522 | CACGGUGGA | | 3075777 | | UGAACUAAAU | | | |
| AD- | UAGUUCAUGAUC | | 3075758- | 6084-6104 | UACCACCGUGAUC | | 3075756-3075778 | 6082-6104 |
| 1640523 | ACGGUGGUA | | 3075778 | | AUGAACUAAA | | | |
| AD- | UAGUUCAUGAUC | | 3075758- | 6084-6104 | UACCACCGUGATC | | 3075756-3075778 | 6082-6104 |
| 1640524 | ACGGUGGUA | | 3075778 | | AUGAACUAAA | | | |
| AD- | AGUUCAUGAUCA | | 3075759- | 6085-6105 | UUACCACCGUGAU | | 3075757-3075779 | 6083-6105 |
| 1640525 | CGGUGGUAA | | 3075779 | | CAUGAACUAA | | | |
| AD- | GUUCAUGAUCAC | | 3075760- | 6086-6106 | UCUACCACCGUGA | | 3075758-3075780 | 6084-6106 |
| 1640526 | GGUGGUAGA | | 3075780 | | UCAUGAACUA | | | |
| AD- | GUUCAUGAUCAC | | 3075760- | 6086-6106 | UCUACCACCGUGA | | 3075758-3075780 | 6084-6106 |
| 1640527 | GGUGGUAGA | | 3075780 | | UCAUGAACUA | | | |
| AD- | CAUGAUCACGGU | | 3075763- | 6089-6109 | UUUACUACCACCG | | 3075761-3075783 | 6087-6109 |
| 1640528 | GGUAGUAAA | | 3075783 | | UGAUCAUGAA | | | |
| AD- | AUGAUCACGGUG | | 3075764- | 6090-6110 | UGUUACTACCACC | | 3075762-3075784 | 6088-6110 |
| 1640529 | GUAGUAACA | | 3075784 | | GUGAUCAUGA | | | |
| AD- | GAUCACGGUGGU | | 3075766- | 6092-6112 | UGUGTUACUACCA | | 3075764-3075786 | 6090-6112 |
| 1640530 | AGUAACACA | | 3075786 | | CCGUGAUCAU | | | |
| AD- | GAUCACGGUGGU | | 3075766- | 6092-6112 | UGUGUUACUACC | | 3075764-3075786 | 6090-6112 |
| 1640531 | AGUAACACA | | 3075786 | | ACCGUGAUCAU | | | |
| AD- | GAUCACGGUGGU | | 3075766- | 6092-6112 | UGUGTUACUACCA | | 3075764-3075786 | 6090-6112 |
| 1640532 | AGUAACACA | | 3075786 | | CCGUGAUCAU | | | |
| AD- | AUCACGGUGGUA | | 3075767- | 6093-6113 | UCGUGUTACUACC | | 3075765-3075787 | 6091-6113 |
| 1640533 | GUAACACGA | | 3075787 | | ACCGUGAUCA | | | |
| AD- | AUCACGGUGGUA | | 3075767- | 6093-6113 | UCGUGUUACUACC | | 3075765-3075787 | 6091-6113 |
| 1640534 | GUAACACGA | | 3075787 | | ACCGUGAUCA | | | |
| AD- | AUCACGGUGGUA | | 3075767- | 6093-6113 | UCGUGUTACUACC | | 3075765-3075787 | 6091-6113 |
| 1640535 | GUAACACGA | | 3075787 | | ACCGUGAUCA | | | |
| AD- | UCACGGUGGUAG | | 3075768- | 6094-6114 | UUCGTGTUACUAC | | 3075766-3075788 | 6092-6114 |
| 1640536 | UAACACGAA | | 3075788 | | CACCGUGAUC | | | |
| AD- | CACGGUGGUAGU | | 3075769- | 6095-6115 | UAUCGUGUUACU | | 3075767-3075789 | 6093-6115 |
| 1640537 | AACACGAUA | | 3075789 | | ACCACCGUGAU | | | |
| AD- | ACGGUGGUAGUA | | 3075770- | 6096-6116 | UAAUCGUGUUAC | | 3075768-3075790 | 6094-6116 |
| 1640538 | ACACGAUUA | | 3075790 | | UACCACCGUGA | | | |
| AD- | ACGGUGGUAGUA | | 3075770- | 6096-6116 | UAAUCGTGUUACU | | 3075768-3075790 | 6094-6116 |
| 1640539 | ACACGAUUA | | 3075790 | | ACCACCGUGA | | | |
| AD- | GCACCACCUAAGA | | 3075794- | 6120-6140 | UGCAGATCUCUUA | | 3075792-3075814 | 6118-6140 |
| 1640540 | GAUCUGCA | | 3075814 | | GGUGGUGCUU | | | |
| AD- | CACCACCUAAGAG | | 3075795- | 6121-6141 | UAGCAGAUCUCU | | 3075793-3075815 | 6119-6141 |
| 1640541 | AUCUGCUA | | 3075815 | | UAGGUGGUGCU | | | |
| AD- | CCACCUAAGAGAU | | 3075797- | 6123-6143 | UUGAGCAGAUCU | | 3075795-3075817 | 6121-6143 |
| 1640542 | CUGCUCAA | | 3075817 | | CUUAGGUGGUG | | | |
| AD- | CCUAAGAGAUCU | | 3075800- | 6126-6146 | UAGATGAGCAGA | | 3075798-3075820 | 6124-6146 |
| 1640543 | GCUCAUCUA | | 3075820 | | UCUCUUAGGUG | | | |
| AD- | UAAGAGAUCUGC | | 3075802- | 6128-6148 | UUUAGATGAGCA | | 3075800-3075822 | 6126-6148 |
| 1640544 | UCAUCUAAA | | 3075822 | | GAUCUCUUAGG | | | |
| AD- | AAGAGAUCUGCU | | 3075803- | 6129-6149 | UCUUAGAUGAGC | | 3075801-3075823 | 6127-6149 |
| 1640545 | CAUCUAAGA | | 3075823 | | AGAUCUCUUAG | | | |
| AD- | AAGAGAUCUGCU | | 3075803- | 6129-6149 | UCUUAGAUGAGC | | 3075801-3075823 | 6127-6149 |
| 1640546 | CAUCUAAGA | | 3075823 | | AGAUCUCUUAG | | | |
| AD- | AAGAGAUCUGCU | | 3075803- | 6129-6149 | UCUUAGAUGAGC | | 3075801-3075823 | 6127-6149 |
| 1640547 | CAUCUAAGA | | 3075823 | | AGAUCUCUUAG | | | |
| AD- | AGAGAUCUGCUC | | 3075804- | 6130-6150 | UGCUUAGAUGAG | | 3075802-3075824 | 6128-6150 |
| 1640548 | AUCUAAGCA | | 3075824 | | CAGAUCUCUUA | | | |
| AD | AGAGAUCUGCUC | | 3075804- | 6130-6150 | UGCUTAGAUGAGC | | 3075802-3075824 | 6128-6150 |
| 1640549 | AUCUAAGCA | | 3075824 | | AGAUCUCUUA | | | |
| AD- | GAGAUCUGCUCA | | 3075805- | 6131-6151 | UGGCTUAGAUGA | | 3075803-3075825 | 6129-6151 |
| 1640550 | UCUAAGCCA | | 3075825 | | GCAGAUCUCUU | | | |
| AD- | GAGAUCUGCUCA | | 3075805- | 6131-6151 | UGGCUUAGAUGA | | 3075803-3075825 | 6129-6151 |
| 1640551 | UCUAAGCCA | | 3075825 | | GCAGAUCUCUU | | | |
| AD- | AGAUCUGCUCAUC | | 3075806- | 6132-6152 | UAGGCUTAGAUG | | 3075804-3075826 | 6130-6152 |
| 1640552 | UAAGCCUA | | 3075826 | | AGCAGAUCUCU | | | |
| AD- | GAUCUGCUCAUCU | | 3075807- | 6133-6153 | UUAGGCTUAGAU | | 3075805-3075827 | 6131-6153 |
| 1640553 | AAGCCUAA | | 3075827 | | GAGCAGAUCUC | | | |
| AD- | CUGCUCAUCUAAG | | 3075810- | 6136-6156 | UACUUAGGCUUA | | 3075808-3075830 | 6134-6156 |
| 1640554 | CCUAAGUA | | 3075830 | | GAUGAGCAGAU | | | |
| AD- | CUGCUCAUCUAAG | | 3075810- | 6136-6156 | UACUTAGGCUUAG | | 3075808-3075830 | 6134-6156 |
| 1640555 | CCUAAGUA | | 3075830 | | AUGAGCAGAU | | | |
| AD- | UGCUCAUCUAAGC | | 3075811- | 6137-6157 | UAACTUAGGCUUA | | 3075809-3075831 | 6135-6157 |
| 1640556 | CUAAGUUA | | 3075831 | | GAUGAGCAGA | | | |
| AD- | UGCUCAUCUAAGC | | 3075811- | 6137-6157 | UAACUUAGGCUU | | 3075809-3075831 | 6135-6157 |
| 1640557 | CUAAGUUA | | 3075831 | | AGAUGAGCAGA | | | |
| AD- | UGCUCAUCUAAGC | | 3075811- | 6137-6157 | UAACTUAGGCUTA | | 3075809-3075831 | 6135-6157 |
| 1640558 | CUAAGUUA | | 3075831 | | GAUGAGCAGA | | | |
| AD- | GCUCAUCUAAGCC | | 3075812- | 6138-6158 | UCAACUUAGGCU | | 3075810-3075832 | 6136-6158 |
| 1640559 | UAAGUUGA | | 3075832 | | UAGAUGAGCAG | | | |
| AD- | GCUCAUCUAAGCC | | 3075812- | 6138-6158 | UCAACUTAGGCTU | | 3075810-3075832 | 6136-6158 |
| 1640560 | UAAGUUGA | | 3075832 | | AGAUGAGCAG | | | |
| AD- | CUCAUCUAAGCCU | | 3075813- | 6139-6159 | UCCAACUUAGGCU | | 3075811-3075833 | 6137-6159 |
| 1640561 | AAGUUGGA | | 3075833 | | UAGAUGAGCA | | | |
| AD- | CUCAUCUAAGCCU | | 3075813- | 6139-6159 | UCCAACTUAGGCU | | 3075811-3075833 | 6137-6159 |
| 1640562 | AAGUUGGA | | 3075833 | | UAGAUGAGCA | | | |
| AD- | UCAUCUAAGCCUA | | 3075814- | 6140-6160 | UACCAACUUAGGC | | 3075812-3075834 | 6138-6160 |
| 1640563 | AGUUGGUA | | 3075834 | | UUAGAUGAGC | | | |
| AD- | UCAUCUAAGCCUA | | 3075814- | 6140-6160 | UACCAACUUAGGC | | 3075812-3075834 | 6138-6160 |
| 1640564 | AGUUGGUA | | 3075834 | | UUAGAUGAGC | | | |
| AD- | CAUCUAAGCCUAA | | 3075815- | 6141-6161 | UGACCAACUUAG | | 3075813-3075835 | 6139-6161 |
| 1640565 | GUUGGUCA | | 3075835 | | GCUUAGAUGAG | | | |
| AD- | CAUCUAAGCCUAA | | 3075815- | 6141-6161 | UGACCAACUUAG | | 3075813-3075835 | 6139-6161 |
| 1640566 | GUUGGUCA | | 3075835 | | GCUUAGAUGAG | | | |
| AD- | CAUCUAAGCCUAA | | 3075815- | 6141-6161 | UGACCAACUUAG | | 3075813-3075835 | 6139-6161 |
| 1640567 | GUUGGUCA | | 3075835 | | GCUUAGAUGAG | | | |
| AD- | AUCUAAGCCUAA | | 3075816- | 6142-6162 | UAGACCAACUUA | | 3075814-3075836 | 6140-6162 |
| 1640568 | GUUGGUCUA | | 3075836 | | GGCUUAGAUGA | | | |
| AD- | AUCUAAGCCUAA | | 3075816- | 6142-6162 | UAGACCAACUUA | | 3075814-3075836 | 6140-6162 |
| 1640569 | GUUGGUCUA | | 3075836 | | GGCUUAGAUGA | | | |
| AD- | UCUAAGCCUAAG | | 3075817- | 6143-6163 | UCAGACCAACUUA | | 3075815-3075837 | 6141-6163 |
| 1640570 | UUGGUCUGA | | 3075837 | | GGCUUAGAUG | | | |
| AD- | UCUAAGCCUAAG | | 3075817- | 6143-6163 | UCAGACCAACUTA | | 3075815-3075837 | 6141-6163 |
| 1640571 | UUGGUCUGA | | 3075837 | | GGCUUAGAUG | | | |
| AD- | CUAAGCCUAAGU | | 3075818- | 6144-6164 | UGCAGACCAACUU | | 3075816-3075838 | 6142-6164 |
| 1640572 | UGGUCUGCA | | 3075838 | | AGGCUUAGAU | | | |
| AD- | UAAGCCUAAGUU | | 3075819- | 6145-6165 | UUGCAGACCAACU | | 3075817-3075839 | 6143-6165 |
| 1640573 | GGUCUGCAA | | 3075839 | | UAGGCUUAGA | | | |
| AD- | AGCCUAAGUUGG | | 3075821- | 6147-6167 | UCCUGCAGACCAA | | 3075819-3075841 | 6145-6167 |
| 1640574 | UCUGCAGGA | | 3075841 | | CUUAGGCUUA | | | |
| AD- | CCUAAGUUGGUC | | 3075823- | 6149-6169 | UCGCCUGCAGACC | | 3075821-3075843 | 6147-6169 |
| 1640575 | UGCAGGCGA | | 3075843 | | AACUUAGGCU | | | |
| AD- | CUAAGUUGGUCU | | 3075824- | 6150-6170 | UACGCCTGCAGAC | | 3075822-3075844 | 6148-6170 |
| 1640576 | GCAGGCGUA | | 3075844 | | CAACUUAGGC | | | |
| AD- | UAAGUUGGUCUG | | 3075825- | 6151-6171 | UAACGCCUGCAGA | | 3075823-3075845 | 6149-6171 |
| 1640577 | CAGGCGUUA | | 3075845 | | CCAACUUAGG | | | |
| AD- | UAAGUUGGUCUG | | 3075825- | 6151-6171 | UAACGCCUGCAGA | | 3075823-3075845 | 6149-6171 |
| 1640578 | CAGGCGUUA | | 3075845 | | CCAACUUAGG | | | |
| AD- | AGUUGGUCUGCA | | 3075827- | 6153-6173 | UCAAACGCCUGCA | | 3075825-3075847 | 6151-6173 |
| 1640579 | GGCGUUUGA | | 3075847 | | GACCAACUUA | | | |
| AD- | AGUUGGUCUGCA | | 3075827- | 6153-6173 | UCAAACGCCUGCA | | 3075825-3075847 | 6151-6173 |
| 1640580 | GGCGUUUGA | | 3075847 | | GACCAACUUA | | | |
| AD- | UGGUCUGCAGGC | | 3075830- | 6156-6176 | UAUUCAAACGCCU | | 3075828-3075850 | 6154-6176 |
| 1640581 | GUUUGAAUA | | 3075850 | | GCAGACCAAC | | | |
| AD- | UGGUCUGCAGGC | | 3075830- | 6156-6176 | UAUUCAAACGCCU | | 3075828-3075850 | 6154-6176 |
| 1640582 | GUUUGAAUA | | 3075850 | | GCAGACCAAC | | | |
| AD- | GGUCUGCAGGCG | | 3075831 | 6157-6177 | UCAUTCAAACGCC | | 3075829-3075851 | 6155-6177 |
| 1640583 | UUUGAAUGA | | 3075851 | | UGCAGACCAA | | | |
| AD- | GGUCUGCAGGCG | | 3075831- | 6157-6177 | UCAUUCAAACGCC | | 3075829-3075851 | 6155-6177 |
| 1640584 | UUUGAAUGA | | 3075851 | | UGCAGACCAA | | | |
| AD- | GGUCUGCAGGCG | | 3075831 | 6157-6177 | UCAUTCAAACGCC | | 3075829-3075851 | 6155-6177 |
| 1640585 | UUUGAAUGA | | 3075851 | | UGCAGACCAA | | | |
| AD- | UCUGCAGGCGUU | | 3075833- | 6159-6179 | UCUCAUUCAAACG | | 3075831-3075853 | 6157-6179 |
| 1640586 | UGAAUGAGA | | 3075853 | | CCUGCAGACC | | | |
| AD- | UCUGCAGGCGUU | | 3075833- | 6159-6179 | UCUCAUTCAAACG | | 3075831-3075853 | 6157-6179 |
| 1640587 | UGAAUGAGA | | 3075853 | | CCUGCAGACC | | | |
| AD- | CUGCAGGCGUUU | | 3075834- | 6160-6180 | UACUCATUCAAAC | | 3075832-3075854 | 6158-6180 |
| 1640588 | GAAUGAGUA | | 3075854 | | GCCUGCAGAC | | | |
| AD- | CUGCAGGCGUUU | | 3075834- | 6160-6180 | UACUCAUUCAAAC | | 3075832-3075854 | 6158-6180 |
| 1640589 | GAAUGAGUA | | 3075854 | | GCCUGCAGAC | | | |
| AD- | CUGCAGGCGUUU | | 3075834- | 6160-6180 | UACUCATUCAAAC | | 3075832-3075854 | 6158-6180 |
| 1640590 | GAAUGAGUA | | 3075854 | | GCCUGCAGAC | | | |
| AD- | UGCAGGCGUUUG | | 3075835- | 6161-6181 | UAACTCAUUCAAA | | 3075833-3075855 | 6159-6181 |
| 1640591 | AAUGAGUUA | | 3075855 | | CGCCUGCAGA | | | |
| AD- | GCAGGCGUUUGA | | 3075836- | 6162-6182 | UCAACUCAUUCAA | | 3075834-3075856 | 6160-6182 |
| 1640592 | AUGAGUUGA | | 3075856 | | ACGCCUGCAG | | | |
| AD- | GCAGGCGUUUGA | | 3075836- | 6162-6182 | UCAACUCAUUCAA | | 3075834-3075856 | 6160-6182 |
| 1640593 | AUGAGUUGA | | 3075856 | | ACGCCUGCAG | | | |
| AD- | CAGGCGUUUGAA | | 3075837- | 6163-6183 | UACAACTCAUUCA | | 3075835-3075857 | 6161-6183 |
| 1640594 | UGAGUUGUA | | 3075857 | | AACGCCUGCA | | | |
| AD- | CAGGCGUUUGAA | | 3075837- | 6163-6183 | UACAACUCAUUCA | | 3075835-3075857 | 6161-6183 |
| 1640595 | UGAGUUGUA | | 3075857 | | AACGCCUGCA | | | |
| AD- | CAGGCGUUUGAA | | 3075837- | 6163-6183 | UACAACTCAUUCA | | 3075835-3075857 | 6161-6183 |
| 1640596 | UGAGUUGUA | | 3075857 | | AACGCCUGCA | | | |
| AD- | AGGCGUUUGAAU | | 3075838- | 6164-6184 | UCACAACUCAUUC | | 3075836-3075858 | 6162-6184 |
| 1640597 | GAGUUGUGA | | 3075858 | | AAACGCCUGC | | | |
| AD- | AGGCGUUUGAAU | | 3075838- | 6164-6184 | UCACAACUCAUTC | | 3075836-3075858 | 6162-6184 |
| 1640598 | GAGUUGUGA | | 3075858 | | AAACGCCUGC | | | |
| AD- | GCGUUUGAAUGA | | 3075840- | 6166-6186 | UACCACAACUCAU | | 3075838-3075860 | 6164-6186 |
| 1640599 | GUUGUGGUA | | 3075860 | | UCAAACGCCU | | | |
| AD- | GCGUUUGAAUGA | | 3075840- | 6166-6186 | UACCACAACUCAU | | 3075838-3075860 | 6164-6186 |
| 1640600 | GUUGUGGUA | | 3075860 | | UCAAACGCCU | | | |
| AD- | GUUUGAAUGAGU | | 3075842- | 6168-6188 | UCAACCACAACUC | | 3075840-3075862 | 6166-6188 |
| 1640601 | UGUGGUUGA | | 3075862 | | AUUCAAACGC | | | |
| AD- | GUUUGAAUGAGU | | 3075842- | 6168-6188 | UCAACCACAACTC | | 3075840-3075862 | 6166-6188 |
| 1640602 | UGUGGUUGA | | 3075862 | | AUUCAAACGC | | | |
| AD- | UUUGAAUGAGUU | | 3075843- | 6169-6189 | UGCAACCACAACU | | 3075841-3075863 | 6167-6189 |
| 1640603 | GUGGUUGCA | | 3075863 | | CAUUCAAACG | | | |
| AD- | UUUGAAUGAGUU | | 3075843- | 6169-6189 | UGCAACCACAACU | | 3075841-3075863 | 6167-6189 |
| 1640604 | GUGGUUGCA | | 3075863 | | CAUUCAAACG | | | |
| AD- | UUGAAUGAGUUG | | 3075844- | 6170-6190 | UGGCAACCACAAC | | 3075842-3075864 | 6168-6190 |
| 1640605 | UGGUUGCCA | | 3075864 | | UCAUUCAAAC | | | |
| AD- | UUGAAUGAGUUG | | 3075844- | 6170-6190 | UGGCAACCACAAC | | 3075842-3075864 | 6168-6190 |
| 1640606 | UGGUUGCCA | | 3075864 | | UCAUUCAAAC | | | |
| AD- | UGAAUGAGUUGU | | 3075845- | 6171-6191 | UUGGCAACCACAA | | 3075843-3075865 | 6169-6191 |
| 1640607 | GGUUGCCAA | | 3075865 | | CUCAUUCAAA | | | |
| AD- | GAGUUGUGGUUG | | 3075850- | 6176-6196 | UUUACUTGGCAAC | | 3075848-3075870 | 6174-6196 |
| 1640608 | CCAAGUAAA | | 3075870 | | CACAACUCAU | | | |
| AD- | AGUUGUGGUUGC | | 3075851- | 6177-6197 | UUUUACTUGGCAA | | 3075849-3075871 | 6175-6197 |
| 1640609 | CAAGUAAAA | | 3075871 | | CCACAACUCA | | | |
| AD- | GUUGUGGUUGCC | | 3075852- | 6178-6198 | UCUUUACUUGGC | | 3075850-3075872 | 6176-6198 |
| 1640610 | AAGUAAAGA | | 3075872 | | AACCACAACUC | | | |
| AD- | GUUGUGGUUGCC | | 3075852- | 6178-6198 | UCUUTACUUGGCA | | 3075850-3075872 | 6176-6198 |
| 1640611 | AAGUAAAGA | | 3075872 | | ACCACAACUC | | | |
| AD- | UUGUGGUUGCCA | | 3075853- | 6179-6199 | UACUUUACUUGG | | 3075851-3075873 | 6177-6199 |
| 1640612 | AGUAAAGUA | | 3075873 | | CAACCACAACU | | | |
| AD- | UUGUGGUUGCCA | | 3075853- | 6179-6199 | UACUTUACUUGGC | | 3075851-3075873 | 6177-6199 |
| 1640613 | AGUAAAGUA | | 3075873 | | AACCACAACU | | | |
| AD- | UGGUUGCCAAGU | | 3075856- | 6182-6202 | UACCACTUUACUU | | 3075854-3075876 | 6180-6202 |
| 1640614 | AAAGUGGUA | | 3075876 | | GGCAACCACA | | | |
| AD- | UGGUUGCCAAGU | | 3075856- | 6182-6202 | UACCACUUUACUU | | 3075854-3075876 | 6180-6202 |
| 1640615 | AAAGUGGUA | | 3075876 | | GGCAACCACA | | | |
| AD- | UGGUUGCCAAGU | | 3075856- | 6182-6202 | UACCACTUUACTU | | 3075854-3075876 | 6180-6202 |
| 1640616 | AAAGUGGUA | | 3075876 | | GGCAACCACA | | | |
| AD- | GGUUGCCAAGUA | | 3075857- | 6183-6203 | UCACCACUUUACU | | 3075855-3075877 | 6181-6203 |
| 1640617 | AAGUGGUGA | | 3075877 | | UGGCAACCAC | | | |
| AD- | GGUUGCCAAGUA | | 3075857- | 6183-6203 | UCACCACUUUACU | | 3075855-3075877 | 6181-6203 |
| 1640618 | AAGUGGUGA | | 3075877 | | UGGCAACCAC | | | |
| AD- | GCCAAGUAAAGU | | 3075861- | 6187-6207 | UAGUTCACCACUU | | 3075859-3075881 | 6185-6207 |
| 1640619 | GGUGAACUA | | 3075881 | | UACUUGGCAA | | | |
| AD- | CAAGUAAAGUGG | | 3075863- | 6189-6209 | UUAAGUTCACCAC | | 3075861-3075883 | 6187-6209 |
| 1640620 | UGAACUUAA | | 3075883 | | UUUACUUGGC | | | |
| AD- | AAGUAAAGUGGU | | 3075864- | 6190-6210 | UGUAAGTUCACCA | | 3075862-3075884 | 6188-6210 |
| 1640621 | GAACUUACA | | 3075884 | | CUUUACUUGG | | | |
| AD- | AGUAAAGUGGUG | | 3075865- | 6191-6211 | UCGUAAGUUCACC | | 3075863-3075885 | 6189-6211 |
| 1640622 | AACUUACGA | | 3075885 | | ACUUUACUUG | | | |
| AD- | AGUAAAGUGGUG | | 3075865- | 6191-6211 | UCGUAAGUUCACC | | 3075863-3075885 | 6189-6211 |
| 1640623 | AACUUACGA | | 3075885 | | ACUUUACUUG | | | |
| AD- | GUAAAGUGGUGA | | 3075866- | 6192-6212 | UACGUAAGUUCA | | 3075864-3075886 | 6190-6212 |
| 1640624 | ACUUACGUA | | 3075886 | | CCACUUUACUU | | | |
| AD- | GUAAAGUGGUGA | | 3075866- | 6192-6212 | UACGTAAGUUCAC | | 3075864-3075886 | 6190-6212 |
| 1640625 | ACUUACGUA | | 3075886 | | CACUUUACUU | | | |
| AD- | UAAAGUGGUGAA | | 3075867- | 6193-6213 | UCACGUAAGUUC | | 3075865-3075887 | 6191-6213 |
| 1640626 | CUUACGUGA | | 3075887 | | ACCACUUUACU | | | |
| AD- | UAAAGUGGUGAA | | 3075867- | 6193-6213 | UCACGUAAGUUC | | 3075865-3075887 | 6191-6213 |
| 1640627 | CUUACGUGA | | 3075887 | | ACCACUUUACU | | | |
| AD- | AAAGUGGUGAAC | | 3075868- | 6194-6214 | UCCACGUAAGUUC | | 3075866-3075888 | 6192-6214 |
| 1640628 | UUACGUGGA | | 3075888 | | ACCACUUUAC | | | |
| AD- | AAAGUGGUGAAC | | 3075868- | 6194-6214 | UCCACGTAAGUTC | | 3075866-3075888 | 6192-6214 |
| 1640629 | UUACGUGGA | | 3075888 | | ACCACUUUAC | | | |
| AD- | AAGUGGUGAACU | | 3075869- | 6195-6215 | UACCACGUAAGU | | 3075867-3075889 | 6193-6215 |
| 1640630 | UACGUGGUA | | 3075889 | | UCACCACUUUA | | | |
| AD- | AAGUGGUGAACU | | 3075869- | 6195-6215 | UACCACGUAAGTU | | 3075867-3075889 | 6193-6215 |
| 1640631 | UACGUGGUA | | 3075889 | | CACCACUUUA | | | |
| AD- | AGUGGUGAACUU | | 3075870- | 6196-6216 | UCACCACGUAAGU | | 3075868-3075890 | 6194-6216 |
| 1640632 | ACGUGGUGA | | 3075890 | | UCACCACUUU | | | |
| AD- | AGUGGUGAACUU | | 3075870- | 6196-6216 | UCACCACGUAAGU | | 3075868-3075890 | 6194-6216 |
| 1640633 | ACGUGGUGA | | 3075890 | | UCACCACUUU | | | |
| AD- | GUGGUGAACUUA | | 3075871- | 6197-6217 | UUCACCACGUAAG | | 3075869-3075891 | 6195-6217 |
| 1640634 | CGUGGUGAA | | 3075891 | | UUCACCACUU | | | |
| AD- | GUGGUGAACUUA | | 3075871- | 6197-6217 | UUCACCACGUAAG | | 3075869-3075891 | 6195-6217 |
| 1640635 | CGUGGUGAA | | 3075891 | | UUCACCACUU | | | |
| AD- | GUGGUGAACUUA | | 3075871- | 6197-6217 | UTCACCACGUAAG | | 3075869-3075891 | 6195-6217 |
| 1640636 | CGUGGUGAA | | 3075891 | | UUCACCACUU | | | |
| AD- | GUGAACUUACGU | | 3075874- | 6200-6220 | UUAATCACCACGU | | 3075872-3075894 | 6198-6220 |
| 1640637 | GGUGAUUAA | | 3075894 | | AAGUUCACCA | | | |
| AD- | GAACUUACGUGG | | 3075876- | 6202-6222 | UAUUAATCACCAC | | 3075874-3075896 | 6200-6222 |
| 1640638 | UGAUUAAUA | | 3075896 | | GUAAGUUCAC | | | |
| AD- | GAACUUACGUGG | | 3075876- | 6202-6222 | UAUUAAUCACCAC | | 3075874-3075896 | 6200-6222 |
| 1640639 | UGAUUAAUA | | 3075896 | | GUAAGUUCAC | | | |
| AD- | GAACUUACGUGG | | 3075876- | 6202-6222 | UAUUAATCACCAC | | 3075874-3075896 | 6200-6222 |
| 1640640 | UGAUUAAUA | | 3075896 | | GUAAGUUCAC | | | |
| AD- | AACUUACGUGGU | | 3075877- | 6203-6223 | UCAUUAAUCACCA | | 3075875-3075897 | 6201-6223 |
| 1640641 | GAUUAAUGA | | 3075897 | | CGUAAGUUCA | | | |
| AD- | AACUUACGUGGU | | 3075877- | 6203-6223 | UCAUTAAUCACCA | | 3075875-3075897 | 6201-6223 |
| 1640642 | GAUUAAUGA | | 3075897 | | CGUAAGUUCA | | | |
| AD- | ACUUACGUGGUG | | 3075878- | 6204-6224 | UUCAUUAAUCACC | | 3075876-3075898 | 6202-6224 |
| 1640643 | AUUAAUGAA | | 3075898 | | ACGUAAGUUC | | | |
| AD- | ACUUACGUGGUG | | 3075878- | 6204-6224 | UTCATUAAUCACC | | 3075876-3075898 | 6202-6224 |
| 1640644 | AUUAAUGAA | | 3075898 | | ACGUAAGUUC | | | |
| AD- | CUUACGUGGUGA | | 3075879- | 6205-6225 | UUUCAUTAAUCAC | | 3075877-3075899 | 6203-6225 |
| 1640645 | UUAAUGAAA | | 3075899 | | CACGUAAGUU | | | |
| AD- | CUUACGUGGUGA | | 3075879- | 6205-6225 | UUUCAUUAAUCA | | 3075877-3075899 | 6203-6225 |
| 1640646 | UUAAUGAAA | | 3075899 | | CCACGUAAGUU | | | |
| AD- | CUUACGUGGUGA | | 3075879- | 6205-6225 | UTUCAUTAAUCAC | | 3075877-3075899 | 6203-6225 |
| 1640647 | UUAAUGAAA | | 3075899 | | CACGUAAGUU | | | |
| AD- | UUACGUGGUGAU | | 3075880- | 6206-6226 | UUUUCATUAAUCA | | 3075878-3075900 | 6204-6226 |
| 1640648 | UAAUGAAAA | | 3075900 | | CCACGUAAGU | | | |
| AD- | UACGUGGUGAUU | | 3075881- | 6207-6227 | UAUUTCAUUAAUC | | 3075879-3075901 | 6205-6227 |
| 1640649 | AAUGAAAUA | | 3075901 | | ACCACGUAAG | | | |
| AD- | UGGUGAUUAAUG | | 3075885- | 6211-6231 | UGAUAATUUCAU | | 3075883-3075905 | 6209-6231 |
| 1640650 | AAAUUAUCA | | 3075905 | | UAAUCACCACG | | | |
| AD- | UGGUGAUUAAUG | | 3075885- | 6211-6231 | UGAUAAUUUCAU | | 3075883-3075905 | 6209-6231 |
| 1640651 | AAAUUAUCA | | 3075905 | | UAAUCACCACG | | | |
| AD- | UGGUGAUUAAUG | | 3075885- | 6211-6231 | UGAUAATUUCATU | | 3075883-3075905 | 6209-6231 |
| 1640652 | AAAUUAUCA | | 3075905 | | AAUCACCACG | | | |
| AD- | AGUUUGGGCCCGC | | 3075092- | 5418-5438 | UAGCTGCAGCGGG | | 3075090-3075112 | 5416-5438 |
| 1640653 | UGCAGCUA | | 3075112 | | CCCAAACUCA | | | |
| AD- | UGGCGGUAACCCU | | 3075146- | 5472-5492 | UAGGCUGCAGGG | | 3075144-3075166 | 5470-5492 |
| 1640654 | GCAGCCUA | | 3075166 | | UUACCGCCAUC | | | |
| AD- | CAGAGACAGAGU | | 3075196- | 5522-5542 | UGCUGGGUCACUC | | 3075194-3075216 | 5520-5542 |
| 1640655 | GACCCAGCA | | 3075216 | | UGUCUCUGCG | | | |
| AD- | AGAGACAGAGUG | | 3075197- | 5523-5543 | UUGCTGGGUCACU | | 3075195-3075217 | 5521-5543 |
| 1640656 | ACCCAGCAA | | 3075217 | | CUGUCUCUGC | | | |
| AD- | GAGACAGAGUGA | | 3075198- | 5524-5544 | UUUGCUGGGUCA | | 3075196-3075218 | 5522-5544 |
| 1640657 | CCCAGCAAA | | 3075218 | | CUCUGUCUCUG | | | |
| AD- | GACAGAGUGACCC | | 3075200- | 5526-5546 | UGGUTGCUGGGUC | | 3075198-3075220 | 5524-5546 |
| 1640658 | AGCAACCA | | 3075220 | | ACUCUGUCUC | | | |
| AD- | ACAGAGUGACCCA | | 3075201- | 5527-5547 | UGGGTUGCUGGG | | 3075199-3075221 | 5525-5547 |
| 1640659 | GCAACCCA | | 3075221 | | UCACUCUGUCU | | | |
| AD- | GAGUGACCCAGCA | | 3075204- | 5530-5550 | UUCUGGGUUGCU | | 3075202-3075224 | 5528-5550 |
| 1640660 | ACCCAGAA | | 3075224 | | GGGUCACUCUG | | | |
| AD- | AGUGACCCAGCAA | | 3075205- | 5531-5551 | UCUCTGGGUUGCU | | 3075203-3075225 | 5529-5551 |
| 1640661 | CCCAGAGA | | 3075225 | | GGGUCACUCU | | | |
| AD- | AGCAACCCAGAGC | | 3075213- | 5539-5559 | UCUCAUGGGCUCU | | 3075211-3075233 | 5537-5559 |
| 1640662 | CCAUGAGA | | 3075233 | | GGGUUGCUGG | | | |
| AD- | AACCCAGAGCCCA | | 3075216- | 5542-5562 | UUCCCUCAUGGGC | | 3075214-3075236 | 5540-5562 |
| 1640663 | UGAGGGAA | | 3075236 | | UCUGGGUUGC | | | |
| AD- | CCCAGAGCCCAUG | | 3075218- | 5544-5564 | UUGUCCCUCAUGG | | 3075216-3075238 | 5542-5564 |
| 1640664 | AGGGACAA | | 3075238 | | GCUCUGGGUU | | | |
| AD- | CCAGAGCCCAUGA | | 3075219- | 5545-5565 | UGUGTCCCUCAUG | | 3075217-3075239 | 5543-5565 |
| 1640665 | GGGACACA | | 3075239 | | GGCUCUGGGU | | | |
| AD- | CGCUCCCUCACUU | | 3075279- | 5605-5625 | UAAGACCCAAGU | | 3075277-3075299 | 5603-5625 |
| 1640666 | GGGUCUUA | | 3075299 | | GAGGGAGCGGG | | | |
| AD- | GCUCCCUCACUUG | | 3075280- | 5606-5626 | UGAAGACCCAAG | | 3075278-3075300 | 5604-5626 |
| 1640667 | GGUCUUCA | | 3075300 | | UGAGGGAGCGG | | | |
| AD- | UCCCUCACUUGGG | | 3075282 | 5608-5628 | UGGGAAGACCCA | | 3075280-3075302 | 5606-5628 |
| 1640668 | UCUUCCCA | | 3075302 | | AGUGAGGGAGC | | | |
| AD- | UCACUUGGGUCU | | 3075286- | 5612-5632 | UACAAGGGAAGA | | 3075284-3075306 | 5610-5632 |
| 1640669 | UCCCUUGUA | | 3075306 | | CCCAAGUGAGG | | | |
| AD- | CACUUGGGUCUUC | | 3075287- | 5613-5633 | UGACAAGGGAAG | | 3075285-3075307 | 5611-5633 |
| 1640670 | CCUUGUCA | | 3075307 | | ACCCAAGUGAG | | | |
| AD- | UUGGGUCUUCCCU | | 3075290- | 5616-5636 | UGAGGACAAGGG | | 3075288-3075310 | 5614-5636 |
| 1640671 | UGUCCUCA | | 3075310 | | AAGACCCAAGU | | | |
| AD- | GGGUCUUCCCUUG | | 3075292 | 5618-5638 | UGAGAGGACAAG | | 3075290-3075312 | 5616-5638 |
| 1640672 | UCCUCUCA | | 3075312 | | GGAAGACCCAA | | | |
| AD- | GGUCUUCCCUUGU | | 3075293- | 5619-5639 | UCGAGAGGACAA | | 3075291-3075313 | 5617-5639 |
| 1640673 | CCUCUCGA | | 3075313 | | GGGAAGACCCA | | | |
| AD- | CCCUUGUCCUCUC | | 3075299- | 5625-5645 | UCCCTCGCGAGAG | | 3075297-3075319 | 5623-5645 |
| 1640674 | GCGAGGGA | | 3075319 | | GACAAGGGAA | | | |
| AD- | GCCUGUCCUGAAU | | 3075338- | 5664-5684 | UUCGGUGAAUUC | | 3075336-3075358 | 5662-5684 |
| 1640675 | UCACCGAA | | 3075358 | | AGGACAGGCCC | | | |
| AD- | CUGUCCUGAAUUC | | 3075340- | 5666-5686 | UCCUCGGUGAAU | | 3075338-3075360 | 5664-5686 |
| 1640676 | ACCGAGGA | | 3075360 | | UCAGGACAGGC | | | |
| AD- | GCCCUUCGCAGGA | | 3075383- | 5709-5729 | UCUUCGCAUCCUG | | 3075381-3075403 | 5707-5729 |
| 1640677 | UGCGAAGA | | 3075403 | | CGAAGGGCGA | | | |
| AD- | CCCUUCGCAGGAU | | 3075384 | 5710-5730 | UUCUTCGCAUCCU | | 3075382-3075404 | 5708-5730 |
| 1640678 | GCGAAGAA | | 3075404 | | GCGAAGGGCG | | | |
| AD- | CCUUCGCAGGAUG | | 3075385- | 5711-5731 | UCUCTUCGCAUCC | | 3075383-3075405 | 5709-5731 |
| 1640679 | CGAAGAGA | | 3075405 | | UGCGAAGGGC | | | |
| AD- | UCGCAGGAUGCG | | 3075388- | 5714-5734 | UCAACUCUUCGCA | | 3075386-3075408 | 5712-5734 |
| 1640680 | AAGAGUUGA | | 3075408 | | UCCUGCGAAG | | | |
| AD- | UAUUUGCGAGAA | | 3075429- | 5755-5775 | UGCCCUGGUUUCU | | 3075427-3075449 | 5753-5775 |
| 1640681 | ACCAGGGCA | | 3075449 | | CGCAAAUAAA | | | |
| AD- | AACUGCGUUGUG | | 3075461- | 5787-5807 | UGUUCUCUUCACA | | 3075459-3075481 | 5785-5807 |
| 1640682 | AAGAGAACA | | 3075481 | | ACGCAGUUAA | | | |
| AD- | CUGCGUUGUGAA | | 3075463- | 5789-5809 | UAAGTUCUCUUCA | | 3075461-3075483 | 5787-5809 |
| 1640683 | GAGAACUUA | | 3075483 | | CAACGCAGUU | | | |
| AD- | CGUUGUGAAGAG | | 3075466- | 5792-5812 | UUCCAAGUUCUCU | | 3075464-3075486 | 5790-5812 |
| 1640684 | AACUUGGAA | | 3075486 | | UCACAACGCA | | | |
| AD- | GUGAAGAGAACU | | 3075470- | 5796-5816 | UCUCCUCCAAGUU | | 3075468-3075490 | 5794-5816 |
| 1640685 | UGGAGGAGA | | 3075490 | | CUCUUCACAA | | | |
| AD- | GAAGAGAACUUG | | 3075472- | 5798-5818 | UGGCTCCUCCAAG | | 3075470-3075492 | 5796-5818 |
| 1640686 | GAGGAGCCA | | 3075492 | | UUCUCUUCAC | | | |
| AD- | AAGAGAACUUGG | | 3075473- | 5799-5819 | UCGGCUCCUCCAA | | 3075471-3075493 | 5797-5819 |
| 1640687 | AGGAGCCGA | | 3075493 | | GUUCUCUUCA | | | |
| AD- | GAGAACUUGGAG | | 3075475- | 5801-5821 | UCUCGGCUCCUCC | | 3075473-3075495 | 5799-5821 |
| 1640688 | GAGCCGAGA | | 3075495 | | AAGUUCUCUU | | | |
| AD- | AGAACUUGGAGG | | 3075476- | 5802-5822 | UUCUCGGCUCCUC | | 3075474-3075496 | 5800-5822 |
| 1640689 | AGCCGAGAA | | 3075496 | | CAAGUUCUCU | | | |
| AD- | GAACUUGGAGGA | | 3075477- | 5803-5823 | UAUCTCGGCUCCU | | 3075475-3075497 | 5801-5823 |
| 1640690 | GCCGAGAUA | | 3075497 | | CCAAGUUCUC | | | |
| AD- | AACUUGGAGGAG | | 3075478- | 5804-5824 | UAAUCUCGGCUCC | | 3075476-3075498 | 5802-5824 |
| 1640691 | CCGAGAUUA | | 3075498 | | UCCAAGUUCU | | | |
| AD- | AGGAGCCGAGAU | | 3075485- | 5811-5831 | UCUGAGCAAAUC | | 3075483-3075505 | 5809-5831 |
| 1640692 | UUGCUCAGA | | 3075505 | | UCGGCUCCUCC | | | |
| AD- | GGAGCCGAGAUU | | 3075486- | 5812-5832 | UACUGAGCAAAU | | 3075484-3075506 | 5810-5832 |
| 1640693 | UGCUCAGUA | | 3075506 | | CUCGGCUCCUC | | | |
| AD- | AGCCGAGAUUUG | | 3075488- | 5814-5834 | UGCACUGAGCAA | | 3075486-3075508 | 5812-5834 |
| 1640694 | CUCAGUGCA | | 3075508 | | AUCUCGGCUCC | | | |
| AD- | CCGAGAUUUGCUC | | 3075490- | 5816-5836 | UUGGCACUGAGC | | 3075488-3075510 | 5814-5836 |
| 1640695 | AGUGCCAA | | 3075510 | | AAAUCUCGGCU | | | |
| AD- | GAGAUUUGCUCA | | 3075492- | 5818-5838 | UAGUGGCACUGA | | 3075490-3075512 | 5816-5838 |
| 1640696 | GUGCCACUA | | 3075512 | | GCAAAUCUCGG | | | |
| AD- | AGAUUUGCUCAG | | 3075493- | 5819-5839 | UAAGTGGCACUGA | | 3075491-3075513 | 5817-5839 |
| 1640697 | UGCCACUUA | | 3075513 | | GCAAAUCUCG | | | |
| AD- | GAUUUGCUCAGU | | 3075494- | 5820-5840 | UGAAGUGGCACU | | 3075492-3075514 | 5818-5840 |
| 1640698 | GCCACUUCA | | 3075514 | | GAGCAAAUCUC | | | |
| AD- | UUUGCUCAGUGCC | | 3075496- | 5822-5842 | UGGGAAGUGGCA | | 3075494-3075516 | 5820-5842 |
| 1640699 | ACUUCCCA | | 3075516 | | CUGAGCAAAUC | | | |
| AD- | GCUCAGUGCCACU | | 3075499- | 5825-5845 | UAGAGGGAAGUG | | 3075497-3075519 | 5823-5845 |
| 1640700 | UCCCUCUA | | 3075519 | | GCACUGAGCAA | | | |
| AD- | CUCAGUGCCACUU | | 3075500- | 5826-5846 | UAAGAGGGAAGU | | 3075498-3075520 | 5824-5846 |
| 1640701 | CCCUCUUA | | 3075520 | | GGCACUGAGCA | | | |
| AD- | AGUGCCACUUCCC | | 3075503- | 5829-5849 | UUAGAAGAGGGA | | 3075501-3075523 | 5827-5849 |
| 1640702 | UCUUCUAA | | 3075523 | | AGUGGCACUGA | | | |
| AD- | GCCACUUCCCUCU | | 3075506- | 5832-5852 | UGACTAGAAGAG | | 3075504-3075526 | 5830-5852 |
| 1640703 | UCUAGUCA | | 3075526 | | GGAAGUGGCAC | | | |
| AD- | ACUUCCCUCUUCU | | 3075509- | 5835-5855 | UUCAGACUAGAA | | 3075507-3075529 | 5833-5855 |
| 1640704 | AGUCUGAA | | 3075529 | | GAGGGAAGUGG | | | |
| AD- | UUCCCUCUUCUAG | | 3075511- | 5837-5857 | UUCUCAGACUAG | | 3075509-3075531 | 5835-5857 |
| 1640705 | UCUGAGAA | | 3075531 | | AAGAGGGAAGU | | | |
| AD- | CCCUCUUCUAGUC | | 3075513- | 5839-5859 | UCCUCUCAGACUA | | 3075511-3075533 | 5837-5859 |
| 1640706 | UGAGAGGA | | 3075533 | | GAAGAGGGAA | | | |
| AD- | CUCUUCUAGUCUG | | 3075515- | 5841-5861 | UUCCCUCUCAGAC | | 3075513-3075535 | 5839-5861 |
| 1640707 | AGAGGGAA | | 3075535 | | UAGAAGAGGG | | | |
| AD- | CUUCUAGUCUGA | | 3075517- | 5843-5863 | UCUUCCCUCUCAG | | 3075515-3075537 | 5841-5863 |
| 1640708 | GAGGGAAGA | | 3075537 | | ACUAGAAGAG | | | |
| AD- | UUCUAGUCUGAG | | 3075518- | 5844-5864 | UUCUTCCCUCUCA | | 3075516-3075538 | 5842-5864 |
| 1640709 | AGGGAAGAA | | 3075538 | | GACUAGAAGA | | | |
| AD- | AGUCUGAGAGGG | | 3075522- | 5848-5868 | UGCCCUCUUCCCU | | 3075520-3075542 | 5846-5868 |
| 1640711 | AAGAGGGCA | | 3075542 | | CUCAGACUAG | | | |
| AD- | UCUGAGAGGGAA | | 3075524- | 5850-5870 | UCAGCCCUCUUCC | | 3075522-3075544 | 5848-5870 |
| 1640712 | GAGGGCUGA | | 3075544 | | CUCUCAGACU | | | |
| AD- | CUGAGAGGGAAG | | 3075525- | 5851-5871 | UCCAGCCCUCUUC | | 3075523-3075545 | 5849-5871 |
| 1640713 | AGGGCUGGA | | 3075545 | | CCUCUCAGAC | | | |
| AD- | UUUGGAGCUGGA | | 3075575- | 5901-5921 | UCACAUCUCUCCA | | 3075573-3075595 | 5899-5921 |
| 1640714 | GAGAUGUGA | | 3075595 | | GCUCCAAACC | | | |
| AD- | UAGGACGCCUCGG | | 3075620- | 5946-5966 | UACUCCCGCCGAG | | 3075618-3075640 | 5944-5966 |
| 1640715 | CGGGAGUA | | 3075640 | | GCGUCCUAAA | | | |
| AD- | AGGGCGCGUCCAA | | 3075667- | 5993-6013 | UUCUCCCAUUGGA | | 3075665-3075687 | 5991-6013 |
| 1640716 | UGGGAGAA | | 3075687 | | CGCGCCCUCA | | | |
| AD- | GGGCGCGUCCAAU | | 3075668- | 5994-6014 | UAUCTCCCAUUGG | | 3075666-3075688 | 5992-6014 |
| 1640717 | GGGAGAUA | | 3075688 | | ACGCGCCCUC | | | |
| AD- | GGCGCGUCCAAUG | | 3075669- | 5995-6015 | UAAUCUCCCAUUG | | 3075667-3075689 | 5993-6015 |
| 1640718 | GGAGAUUA | | 3075689 | | GACGCGCCCU | | | |
| AD- | CGCGUCCAAUGGG | | 3075671- | 5997-6017 | UGAAAUCUCCCAU | | 3075669-3075691 | 5995-6017 |
| 1640719 | AGAUUUCA | | 3075691 | | UGGACGCGCC | | | |
| AD- | ACAGCCUGAGAU | | 3075711- | 6037-6057 | UAGCCUCAAAUCU | | 3075709-3075731 | 6035-6057 |
| 1640720 | UUGAGGCUA | | 3075731 | | CAGGCUGUUU | | | |
| AD- | AGCCUGAGAUUU | | 3075713- | 6039-6059 | UAGAGCCUCAAA | | 3075711-3075733 | 6037-6059 |
| 1640721 | GAGGCUCUA | | 3075733 | | UCUCAGGCUGU | | | |
| AD- | GCCUGAGAUUUG | | 3075714- | 6040-6060 | UAAGAGCCUCAA | | 3075712-3075734 | 6038-6060 |
| 1640722 | AGGCUCUUA | | 3075734 | | AUCUCAGGCUG | | | |
| AD- | CCUGAGAUUUGA | | 3075715- | 6041-6061 | UGAAGAGCCUCA | | 3075713-3075735 | 6039-6061 |
| 1640723 | GGCUCUUCA | | 3075735 | | AAUCUCAGGCU | | | |
| AD- | UGAGAUUUGAGG | | 3075717- | 6043-6063 | UAGGAAGAGCCU | | 3075715-3075737 | 6041-6063 |
| 1640724 | CUCUUCCUA | | 3075737 | | CAAAUCUCAGG | | | |
| AD- | GAUUUGAGGCUC | | 3075720- | 6046-6066 | UUGUAGGAAGAG | | 3075718-3075740 | 6044-6066 |
| 1640725 | UUCCUACAA | | 3075740 | | CCUCAAAUCUC | | | |
| AD- | AUUUGAGGCUCU | | 3075721- | 6047-6067 | UAUGTAGGAAGA | | 3075719-3075741 | 6045-6067 |
| 1640726 | UCCUACAUA | | 3075741 | | GCCUCAAAUCU | | | |
| AD- | UGAGGCUCUUCCU | | 3075724- | 6050-6070 | UACAAUGUAGGA | | 3075722-3075744 | 6048-6070 |
| 1640727 | ACAUUGUA | | 3075744 | | AGAGCCUCAAA | | | |
| AD- | GCUCUUCCUACAU | | 3075728- | 6054-6074 | UCCUGACAAUGU | | 3075726-3075748 | 6052-6074 |
| 1640728 | UGUCAGGA | | 3075748 | | AGGAAGAGCCU | | | |
| AD- | UCUUCCUACAUUG | | 3075730- | 6056-6076 | UGUCCUGACAAU | | 3075728-3075750 | 6054-6076 |
| 1640729 | UCAGGACA | | 3075750 | | GUAGGAAGAGC | | | |
| AD- | UUCCUACAUUGUC | | 3075732- | 6058-6078 | UAUGTCCUGACAA | | 3075730-3075752 | 6056-6078 |
| 1640730 | AGGACAUA | | 3075752 | | UGUAGGAAGA | | | |
| AD- | UCCUACAUUGUCA | | 3075733 | 6059-6079 | UAAUGUCCUGAC | | 3075731-3075753 | 6057-6079 |
| 1640731 | GGACAUUA | | 3075753 | | AAUGUAGGAAG | | | |
| AD- | CUACAUUGUCAG | | 3075735- | 6061-6081 | UGAAAUGUCCUG | | 3075733-3075755 | 6059-6081 |
| 1640732 | GACAUUUCA | | 3075755 | | ACAAUGUAGGA | | | |
| AD- | UUGUCAGGACAU | | 3075740- | 6066-6086 | UUAAAUGAAAUG | | 3075738-3075760 | 6064-6086 |
| 1640733 | UUCAUUUAA | | 3075760 | | UCCUGACAAUG | | | |
| AD- | GGACAUUUCAUU | | 3075746- | 6072-6092 | UAUGAACUAAAU | | 3075744-3075766 | 6070-6092 |
| 1640734 | UAGUUCAUA | | 3075766 | | GAAAUGUCCUG | | | |
| AD- | UUCAUUUAGUUC | | 3075752- | 6078-6098 | UGUGAUCAUGAA | | 3075750-3075772 | 6076-6098 |
| 1640735 | AUGAUCACA | | 3075772 | | CUAAAUGAAAU | | | |
| AD- | AGUUCAUGAUCA | | 3075759- | 6085-6105 | UUACCACCGUGAU | | 3075757-3075779 | 6083-6105 |
| 1640736 | CGGUGGUAA | | 3075779 | | CAUGAACUAA | | | |
| AD- | UUCAUGAUCACG | | 3075761- | 6087-6107 | UACUACCACCGUG | | 3075759-3075781 | 6085-6107 |
| 1640737 | GUGGUAGUA | | 3075781 | | AUCAUGAACU | | | |
| AD- | UCAUGAUCACGG | | 3075762- | 6088-6108 | UUACTACCACCGU | | 3075760-3075782 | 6086-6108 |
| 1640738 | UGGUAGUAA | | 3075782 | | GAUCAUGAAC | | | |
| AD- | UGAUCACGGUGG | | 3075765- | 6091-6111 | UUGUTACUACCAC | | 3075763-3075785 | 6089-6111 |
| 1640739 | UAGUAACAA | | 3075785 | | CGUGAUCAUG | | | |
| AD- | CACGGUGGUAGU | | 3075769- | 6095-6115 | UAUCGUGUUACU | | 3075767-3075789 | 6093-6115 |
| 1640740 | AACACGAUA | | 3075789 | | ACCACCGUGAU | | | |
| AD- | UAAGCACCACCUA | | 3075791- | 6117-6137 | UGAUCUCUUAGG | | 3075789-3075811 | 6115-6137 |
| 1640741 | AGAGAUCA | | 3075811 | | UGGUGCUUAAA | | | |
| AD- | ACCACCUAAGAGA | | 3075796- | 6122-6142 | UGAGCAGAUCUC | | 3075794-3075816 | 6120-6142 |
| 1640742 | UCUGCUCA | | 3075816 | | UUAGGUGGUGC | | | |
| AD- | CACCUAAGAGAUC | | 3075798- | 6124-6144 | UAUGAGCAGAUC | | 3075796-3075818 | 6122-6144 |
| 1640743 | UGCUCAUA | | 3075818 | | UCUUAGGUGGU | | | |
| AD- | ACCUAAGAGAUC | | 3075799- | 6125-6145 | UGAUGAGCAGAU | | 3075797-3075819 | 6123-6145 |
| 1640744 | UGCUCAUCA | | 3075819 | | CUCUUAGGUGG | | | |
| AD- | CUAAGAGAUCUG | | 3075801- | 6127-6147 | UUAGAUGAGCAG | | 3075799-3075821 | 6125-6147 |
| 1640745 | CUCAUCUAA | | 3075821 | | AUCUCUUAGGU | | | |
| AD- | AGAGAUCUGCUC | | 3075804- | 6130-6150 | UGCUTAGAUGAGC | | 3075802-3075824 | 6128-6150 |
| 1640746 | AUCUAAGCA | | 3075824 | | AGAUCUCUUA | | | |
| AD- | AUCUGCUCAUCUA | | 3075808- | 6134-6154 | UUUAGGCUUAGA | | 3075806-3075828 | 6132-6154 |
| 1640747 | AGCCUAAA | | 3075828 | | UGAGCAGAUCU | | | |
| AD- | CUGCUCAUCUAAG | | 3075810- | 6136-6156 | UACUTAGGCUUAG | | 3075808-3075830 | 6134-6156 |
| 1640748 | CCUAAGUA | | 3075830 | | AUGAGCAGAU | | | |
| AD- | UCUAAGCCUAAG | | 3075817- | 6143-6163 | UCAGACCAACUUA | | 3075815-3075837 | 6141-6163 |
| 1640749 | UUGGUCUGA | | 3075837 | | GGCUUAGAUG | | | |
| AD- | CUAAGCCUAAGU | | 3075818- | 6144-6164 | UGCAGACCAACUU | | 3075816-3075838 | 6142-6164 |
| 1640750 | UGGUCUGCA | | 3075838 | | AGGCUUAGAU | | | |
| AD- | AAGCCUAAGUUG | | 3075820- | 6146-6166 | UCUGCAGACCAAC | | 3075818-3075840 | 6144-6166 |
| 1640751 | GUCUGCAGA | | 3075840 | | UUAGGCUUAG | | | |
| AD- | GCCUAAGUUGGU | | 3075822- | 6148-6168 | UGCCTGCAGACCA | | 3075820-3075842 | 6146-6168 |
| 1640752 | CUGCAGGCA | | 3075842 | | ACUUAGGCUU | | | |
| AD- | CCUAAGUUGGUC | | 3075823- | 6149-6169 | UCGCCUGCAGACC | | 3075821-3075843 | 6147-6169 |
| 1640753 | UGCAGGCGA | | 3075843 | | AACUUAGGCU | | | |
| AD- | UAAGUUGGUCUG | | 3075825- | 6151-6171 | UAACGCCUGCAGA | | 3075823-3075845 | 6149-6171 |
| 1640754 | CAGGCGUUA | | 3075845 | | CCAACUUAGG | | | |
| AD- | GUCUGCAGGCGU | | 3075832- | 6158-6178 | UUCATUCAAACGC | | 3075830-3075852 | 6156-6178 |
| 1640755 | UUGAAUGAA | | 3075852 | | CUGCAGACCA | | | |
| AD- | GCAGGCGUUUGA | | 3075836- | 6162-6182 | UCAACUCAUUCAA | | 3075834-3075856 | 6160-6182 |
| 1640756 | AUGAGUUGA | | 3075856 | | ACGCCUGCAG | | | |
| AD- | UUUGAAUGAGUU | | 3075843- | 6169-6189 | UGCAACCACAACU | | 3075841-3075863 | 6167-6189 |
| 1640757 | GUGGUUGCA | | 3075863 | | CAUUCAAACG | | | |
| AD- | UUGAAUGAGUUG | | 3075844- | 6170-6190 | UGGCAACCACAAC | | 3075842-3075864 | 6168-6190 |
| 1640758 | UGGUUGCCA | | 3075864 | | UCAUUCAAAC | | | |
| AD- | AAUGAGUUGUGG | | 3075847- | 6173-6193 | UCUUGGCAACCAC | | 3075845-3075867 | 6171-6193 |
| 1640759 | UUGCCAAGA | | 3075867 | | AACUCAUUCA | | | |
| AD- | AUGAGUUGUGGU | | 3075848- | 6174-6194 | UACUTGGCAACCA | | 3075846-3075868 | 6172-6194 |
| 1640760 | UGCCAAGUA | | 3075868 | | CAACUCAUUC | | | |
| AD- | UGAGUUGUGGUU | | 3075849- | 6175-6195 | UUACTUGGCAACC | | 3075847-3075869 | 6173-6195 |
| 1640761 | GCCAAGUAA | | 3075869 | | ACAACUCAUU | | | |
| AD- | UUGCCAAGUAAA | | 3075859- | 6185-6205 | UUUCACCACUUUA | | 3075857-3075879 | 6183-6205 |
| 1640762 | GUGGUGAAA | | 3075879 | | CUUGGCAACC | | | |
| AD- | UGCCAAGUAAAG | | 3075860- | 6186-6206 | UGUUCACCACUUU | | 3075858-3075880 | 6184-6206 |
| 1640763 | UGGUGAACA | | 3075880 | | ACUUGGCAAC | | | |
| AD- | CCAAGUAAAGUG | | 3075862- | 6188-6208 | UAAGTUCACCACU | | 3075860-3075882 | 6186-6208 |
| 1640764 | GUGAACUUA | | 3075882 | | UUACUUGGCA | | | |
| AD- | AGUAAAGUGGUG | | 3075865- | 6191-6211 | UCGUAAGUUCACC | | 3075863-3075885 | 6189-6211 |
| 1640765 | AACUUACGA | | 3075885 | | ACUUUACUUG | | | |
| AD- | UGGUGAACUUAC | | 3075872- | 6198-6218 | UAUCACCACGUAA | | 3075870-3075892 | 6196-6218 |
| 1640766 | GUGGUGAUA | | 3075892 | | GUUCACCACU | | | |
| AD- | UGAACUUACGUG | | 3075875- | 6201-6221 | UUUAAUCACCACG | | 3075873-3075895 | 6199-6221 |
| 1640767 | GUGAUUAAA | | 3075895 | | UAAGUUCACC | | | |
| AD- | ACGUGGUGAUUA | | 3075882- | 6208-6228 | UAAUTUCAUUAA | | 3075880-3075902 | 6206-6228 |
| 1640768 | AUGAAAUUA | | 3075902 | | UCACCACGUAA | | | |

TABLE 3
Modified Sense and Antisense Strand Sequences of Intron 1 Targeting HTT dsRNA Agents

| | | SEQ | | SEQ | mRNA | SEQ |
|---|---|---|---|---|---|---|
| Duplex | Sense Sequence | ID | Antisense Sequence | ID | Target Sequence | ID |
| Name | 5′ to 3′ | NO: | 5′ to 3′ | NO: | 5′ to 3′ | NO: |
| AD- | gsgscgg(Uhd)AfaCfCfCfugcagccuga | | VPusCfsagdGc(Tgn)gcagggUfuAfcc | | ATGGCGGTAACCCTGCAGCC | |
| 1640313 | L96 | | gccsasu | | TGC | |
| AD- | gscsaga(Ghd)AfcAfGfAfgugacccaga | | VPusCfsugdGg(Tgn)cacucuGfuCfuc | | CCGCAGAGACAGAGTGACCC | |
| 1640314 | L96 | | ugcsgsg | | AGC | |
| AD- | asgsaca(Ghd)AfgUfGfAfcccagcaaca | | VPusGfsuudGc(Tgn)gggucaCfuCfug | | AGAGACAGAGTGACCCAGCA | |
| 1640315 | L96 | | ucuscsu | | ACC | |
| AD- | csasgag(Uhd)GfaCfCfCfagcaacccaa | | VPusUfsggdGu(Tgn)gcugggUfcAfcu | | GACAGAGTGACCCAGCAACC | |
| 1640316 | L96 | | cugsusc | | CAG | |
| AD- | asgsagu(Ghd)AfcCfCfAfgcaacccaga | | VPusCfsugdGg(Tgn)ugcuggGfuCfac | | ACAGAGTGACCCAGCAACCC | |
| 1640317 | L96 | | ucusgsu | | AGA | |
| AD- | asgscaa(Chd)CfcAfGfAfgcccaugaga | | VPusCfsucaUfgGfGfcucuGfgGfuugc | | CCAGCAACCCAGAGCCCATG | |
| 1640318 | L96 | | usgsg | | AGG | |
| AD- | asgscaa(Chd)ccAfGfAfgcccaugagaL | | VPusdCsucdAudGggcudCuGfgguugcu | | CCAGCAACCCAGAGCCCATG | |
| 1640319 | 96 | | sgsg | | AGG | |
| AD- | gscsaac(Chd)CfaGfAfGfcccaugagga | | VPusCfscucAfuGfGfgcucUfgGfguug | | CAGCAACCCAGAGCCCATGA | |
| 1640320 | L96 | | csusg | | GGG | |
| AD- | gscsaac(Chd)caGfAfGfcccaugaggaL | | VPusdCscudCadTgggcdTcUfggguugc | | CAGCAACCCAGAGCCCATGA | |
| 1640321 | 96 | | susg | | GGG | |
| AD- | csasacc(Chd)AfgAfGfCfccaugaggga | | VPusCfsccdTc(Agn)ugggcuCfuGfgg | | AGCAACCCAGAGCCCATGAG | |
| 1640322 | L96 | | uugscsu | | GGA | |
| AD- | csasacc(Chd)AfgAfGfCfccaugaggga | | VPusCfsccuCfaUfGfggcuCfuGfgguu | | AGCAACCCAGAGCCCATGAG | |
| 1640323 | L96 | | gscsu | | GGA | |
| AD- | csasacc(Chd)agAfGfCfccaugagggaL | | VPusdCsccdTcdAugggdCuCfuggguug | | AGCAACCCAGAGCCCATGAG | |
| 1640324 | 96 | | scsu | | GGA | |
| AD- | ascscca(Ghd)AfgCfCfCfaugagggaca | | VPusGfsucdCc(Tgn)caugggCfuCfug | | CAACCCAGAGCCCATGAGGG | |
| 1640325 | L96 | | ggususg | | ACA | |
| AD- | csgscuc(Chd)CfuCfAfCfuugggucuua | | VPusAfsagaCfcCfAfagugAfgGfgagc | | CCCGCTCCCTCACTTGGGTC | |
| 1640326 | L96 | | gsgsg | | TTC | |
| AD- | csgscuc(Chd)cuCfAfCfuugggucuuaL | | VPusdAsagdAcdCcaagdTgAfgggagcg | | CCCGCTCCCTCACTTGGGTC | |
| 1640327 | 96 | | sgsg | | TTC | |
| AD- | csusccc(Uhd)CfaCfUfUfgggucuucca | | VPusGfsgadAg(Agn)cccaagUfgAfgg | | CGCTCCCTCACTTGGGTCTT | |
| 1640328 | L96 | | gagscsg | | CCC | |
| AD- | cscscuc(Ahd)CfuUfGfGfgucuucccua | | VPusAfsggdGa(Agn)gacccaAfgUfga | | CTCCCTCACTTGGGTCTTCC | |
| 1640329 | L96 | | gggsasg | | CTT | |
| AD- | cscsuca(Chd)UfuGfGfGfucuucccuua | | VPusAfsagdGg(Agn)agacccAfaGfug | | TCCCTCACTTGGGTCTTCCC | |
| 1640330 | L96 | | aggsgsa | | TTG | |
| AD- | cscsuca(Chd)UfuGfGfGfucuucccuua | | VPusAfsaggGfaAfGfacccAfaGfugag | | TCCCTCACTTGGGTCTTCCC | |
| 1640331 | L96 | | gsgsa | | TTG | |
| AD- | cscsuca(Chd)uuGfGfGfucuucccuuaL | | VPusdAsagdGgdAagacdCcAfagugagg | | TCCCTCACTTGGGTCTTCCC | |
| 1640332 | 96 | | sgsa | | TTG | |
| AD- | csascuu(Ghd)GfgUfCfUfucccuuguca | | VPusGfsacaAfgGfGfaagaCfcCfaagu | | CTCACTTGGGTCTTCCCTTG | |
| 1640333 | L96 | | gsasg | | TCC | |
| AD | csascuu(Ghd)ggUfCfUfucccuugucaL | | VPusdGsacdAadGggaadGaCfccaagug | | CTCACTTGGGTCTTCCCTTG | |
| 1640334 | 96 | | sasg | | TCC | |
| AD- | ascsuug(Ghd)GfuCfUfUfcccuugucca | | VPusGfsgadCa(Agn)gggaagAfcCfca | | TCACTTGGGTCTTCCCTTGT | |
| 1640335 | L96 | | agusgsa | | CCT | |
| AD- | ascsuug(Ghd)GfuCfUfUfcccuugucca | | VPusGfsgacAfaGfGfgaagAfcCfcaag | | TCACTTGGGTCTTCCCTTGT | |
| 1640336 | L96 | | usgsa | | CCT | |
| AD- | ascsuug(Ghd)guCfUfUfcccuuguccaL | | VPusdGsgadCadAgggadAgAfcccaagu | | TCACTTGGGTCTTCCCTTGT | |
| 1640337 | 96 | | sgsa | | CCT | |
| AD- | csusugg(Ghd)UfcUfUfCfccuuguccua | | VPusAfsggaCfaAfGfggaaGfaCfccaa | | CACTTGGGTCTTCCCTTGTC | |
| 1640338 | L96 | | gsusg | | CTC | |
| AD- | csusugg(Ghd)ucUfUfCfccuuguccuaL | | VPusdAsggdAcdAagggdAaGfacccaag | | CACTTGGGTCTTCCCTTGTC | |
| 1640339 | 96 | | susg | | CTC | |
| AD- | usgsggu(Chd)UfuCfCfCfuuguccucua | | VPusAfsgadGg(Agn)caagggAfaGfac | | CTTGGGTCTTCCCTTGTCCT | |
| 1640340 | L96 | | ccasasg | | CTC | |
| AD- | gsuscuu(Chd)CfcUfUfGfuccucucgca | | VPusGfscgdAg(Agn)ggacaaGfgGfaa | | GGGTCTTCCCTTGTCCTCTC | |
| 1640341 | L96 | | gacscsc | | GCG | |
| AD- | uscsuuc(Chd)CfuUfGfUfccucucgcga | | VPusCfsgcgAfgAfGfgacaAfgGfgaag | | GGTCTTCCCTTGTCCTCTCG | |
| 1640342 | L96 | | ascsc | | CGA | |
| AD- | uscsuuc(Chd)cuUfGfUfccucucgcgaL | | VPusdCsgcdGadGaggadCaAfgggaaga | | GGTCTTCCCTTGTCCTCTCG | |
| 1640343 | 96 | | scsc | | CGA | |
| AD- | csusucc(Chd)UfuGfUfCfcucucgcgaa | | VPusUfscgcGfaGfAfggacAfaGfggaa | | GTCTTCCCTTGTCCTCTCGC | |
| 1640344 | L96 | | gsasc | | GAG | |
| AD- | csusucc(Chd)uuGfUfCfcucucgcgaaL | | VPusdTscgdCgdAgaggdAcAfagggaag | | GTCTTCCCTTGTCCTCTCGC | |
| 1640345 | 96 | | sasc | | GAG | |
| AD- | ususccc(Uhd)UfgUfCfCfucucgcgaga | | VPusCfsucgCfgAfGfaggaCfaAfggga | | TCTTCCCTTGTCCTCTCGCG | |
| 1640346 | L96 | | asgsa | | AGG | |
| AD- | ususccc(Uhd)ugUfCfCfucucgcgagaL | | VPusdCsucdGcdGagagdGaCfaagggaa | | TCTTCCCTTGTCCTCTCGCG | |
| 1640347 | 96 | | sgsa | | AGG | |
| AD- | uscsccu(Uhd)GfuCfCfUfcucgcgagga | | VPusCfscucGfcGfAfgaggAfcAfaggg | | CTTCCCTTGTCCTCTCGCGA | |
| 1640348 | L96 | | asasg | | GGG | |
| AD- | uscsccu(Uhd)guCfCfUfcucgcgaggaL | | VPusdCscudCgdCgagadGgAfcaaggga | | CTTCCCTTGTCCTCTCGCGA | |
| 1640349 | 96 | | sasg | | GGG | |
| AD- | cscscuu(Ghd)UfcCfUfCfucgcgaggga | | VPusCfsccuCfgCfGfagagGfaCfaagg | | TTCCCTTGTCCTCTCGCGAG | |
| 1640350 | L96 | | gsasa | | GGG | |
| AD- | cscscuu(Ghd)ucCfUfCfucgcgagggaL | | VPusdCsccdTcdGcgagdAgGfacaaggg | | TTCCCTTGTCCTCTCGCGAG | |
| 1640351 | 96 | | sasa | | GGG | |
| AD- | cscsugu(Chd)CfuGfAfAfuucaccgaga | | VPusCfsucgGfuGfAfauucAfgGfacag | | GGCCTGTCCTGAATTCACCG | |
| 1640352 | L96 | | gscsc | | AGG | |
| AD- | cscsugu(Chd)cuGfAfAfuucaccgagaL | | VPusdCsucdGgdTgaaudTcAfggacagg | | GGCCTGTCCTGAATTCACCG | |
| 1640353 | 96 | | scsc | | AGG | |
| AD- | csusguc(Chd)UfgAfAfUfucaccgagga | | VPusCfscucGfgUfGfaauuCfaGfgaca | | GCCTGTCCTGAATTCACCGA | |
| 1640354 | L96 | | gsgsc | | GGG | |
| AD- | csusguc(Chd)ugAfAfUfucaccgaggaL | | VPusdCscudCgdGugaadTuCfaggacag | | GCCTGTCCTGAATTCACCGA | |
| 1640355 | 96 | | sgsc | | GGG | |
| AD- | usgsucc(Uhd)GfaAfUfUfcaccgaggga | | VPusCfsccuCfgGfUfgaauUfcAfggac | | CCTGTCCTGAATTCACCGAG | |
| 1640356 | L96 | | asgsg | | GGG | |
| AD- | usgsucc(Uhd)gaAfUfUfcaccgagggaL | | VPusdCsccdTcdGgugadAuUfcaggaca | | CCTGTCCTGAATTCACCGAG | |
| 1640357 | 96 | | sgsg | | GGG | |
| AD- | uscsgcc(Chd)UfuCfGfCfaggaugcgaa | | VPusUfscgdCa(Tgn)ccugcgAfaGfgg | | TCTCGCCCTTCGCAGGATGC | |
| 1640358 | L96 | | cgasgsa | | GAA | |
| AD- | csgsccc(Uhd)UfcGfCfAfggaugcgaaa | | VPusUfsucdGc(Agn)uccugcGfaAfgg | | CTCGCCCTTCGCAGGATGCG | |
| 1640359 | L96 | | gcgsasg | | AAG | |
| AD- | gscsccu(Uhd)CfgCfAfGfgaugcgaaga | | VPusCfsuucGfcAfUfccugCfgAfaggg | | TCGCCCTTCGCAGGATGCGA | |
| 1640360 | L96 | | csgsa | | AGA | |
| AD- | gscsccu(Uhd)cgCfAfGfgaugcgaagaL | | VPusdCsuudCgdCauccdTgCfgaagggc | | TCGCCCTTCGCAGGATGCGA | |
| 1640361 | 96 | | sgsa | | AGA | |
| AD- | cscsuuc(Ghd)CfaGfGfAfugcgaagaga | | VPusCfsucuUfcGfCfauccUfgCfgaag | | GCCCTTCGCAGGATGCGAAG | |
| 1640362 | L96 | | gsgsc | | AGT | |
| AD- | cscsuuc(Ghd)caGfGfAfugcgaagagaL | | VPusdCsucdTudCgcaudCcUfgcgaagg | | GCCCTTCGCAGGATGCGAAG | |
| 1640363 | 96 | | sgsc | | AGT | |
| AD- | csusucg(Chd)AfgGfAfUfgcgaagagua | | VPusAfscudCu(Tgn)cgcaucCfuGfcg | | CCCTTCGCAGGATGCGAAGA | |
| 1640364 | L96 | | aagsgsg | | GTT | |
| AD- | ususcgc(Ahd)GfgAfUfGfcgaagaguua | | VPusAfsacdTc(Tgn)ucgcauCfcUfgc | | CCTTCGCAGGATGCGAAGAG | |
| 1640365 | L96 | | gaasgsg | | TTG | |
| AD- | uscsgca(Ghd)GfaUfGfCfgaagaguuga | | VPusCfsaacUfcUfUfcgcaUfcCfugcg | | CTTCGCAGGATGCGAAGAGT | |
| 1640366 | L96 | | asasg | | TGG | |
| AD- | uscsgca(Ghd)gaUfGfCfgaagaguugaL | | VPusdCsaadCudCuucgdCaUfccugcga | | CTTCGCAGGATGCGAAGAGT | |
| 1640367 | 96 | | sasg | | TGG | |
| AD- | csgscag(Ghd)AfuGfCfGfaagaguugga | | VPusCfscaaCfuCfUfucgcAfuCfcugc | | TTCGCAGGATGCGAAGAGTT | |
| 1640368 | L96 | | gsasa | | GGG | |
| AD- | csgscag(Ghd)auGfCfGfaagaguuggaL | | VPusdCscadAcdTcuucdGcAfuccugcg | | TTCGCAGGATGCGAAGAGTT | |
| 1640369 | 96 | | sasa | | GGG | |
| AD | gscsagg(Ahd)UfgCfGfAfagaguuggga | | VPusCfsccaAfcUfCfuucgCfaUfccug | | TCGCAGGATGCGAAGAGTTG | |
| 1640370 | L96 | | csgsa | | GGG | |
| AD- | gscsagg(Ahd)ugCfGfAfagaguugggaL | | VPusdCsccdAadCucuudCgCfauccugc | | TCGCAGGATGCGAAGAGTTG | |
| 1640371 | 96 | | sgsa | | GGG | |
| AD- | asusuug(Chd)GfaGfAfAfaccagggcga | | VPusCfsgcdCc(Tgn)gguuucUfcGfca | | TTATTTGCGAGAAACCAGGG | |
| 1640372 | L96 | | aausasa | | CGG | |
| AD- | asusuug(Chd)GfaGfAfAfaccagggcga | | VPusCfsgccCfuGfGfuuucUfcGfcaaa | | TTATTTGCGAGAAACCAGGG | |
| 1640373 | L96 | | usasa | | CGG | |
| AD- | asusuug(Chd)gaGfAfAfaccagggcgaL | | VPusdCsgcdCcdTgguudTcUfcgcaaau | | TTATTTGCGAGAAACCAGGG | |
| 1640374 | 96 | | sasa | | CGG | |
| AD- | ususugc(Ghd)AfgAfAfAfccagggcgga | | VPusCfscgcCfcUfGfguuuCfuCfgcaa | | TATTTGCGAGAAACCAGGGC | |
| 1640375 | L96 | | asusa | | GGG | |
| AD- | ususugc(Ghd)agAfAfAfccagggcggaL | | VPusdCscgdCcdCuggudTuCfucgcaaa | | TATTTGCGAGAAACCAGGGC | |
| 1640376 | 96 | | susa | | GGG | |
| AD- | ususgcg(Ahd)GfaAfAfCfcagggcggga | | VPusCfsccgCfcCfUfgguuUfcUfcgca | | ATTTGCGAGAAACCAGGGCG | |
| 1640377 | L96 | | asasu | | GGG | |
| AD- | ususgcg(Ahd)gaAfAfCfcagggcgggaL | | VPusdCsccdGcdCcuggdTuUfcucgcaa | | ATTTGCGAGAAACCAGGGCG | |
| 1640378 | 96 | | sasu | | GGG | |
| AD- | usasacu(Ghd)CfgUfUfGfugaagagaaa | | VPusUfsucdTc(Tgn)ucacaaCfgCfag | | TTTAACTGCGTTGTGAAGAG | |
| 1640379 | L96 | | uuasasa | | AAC | |
| AD- | ascsugc(Ghd)UfuGfUfGfaagagaacua | | VPusAfsgudTc(Tgn)cuucacAfaCfgc | | TAACTGCGTTGTGAAGAGAA | |
| 1640380 | L96 | | agususa | | CTT | |
| AD- | usgscgu(Uhd)GfuGfAfAfgagaacuuga | | VPusCfsaadGu(Tgn)cucuucAfcAfac | | ACTGCGTTGTGAAGAGAACT | |
| 1640381 | L96 | | gcasgsu | | TGG | |
| AD- | usgscgu(Uhd)GfuGfAfAfgagaacuuga | | VPusCfsaagUfuCfUfcuucAfcAfacgc | | ACTGCGTTGTGAAGAGAACT | |
| 1640382 | L96 | | asgsu | | TGG | |
| AD- | usgscgu(Uhd)guGfAfAfgagaacuugaL | | VPusdCsaadGudTcucudTcAfcaacgca | | ACTGCGTTGTGAAGAGAACT | |
| 1640383 | 96 | | sgsu | | TGG | |
| AD- | gscsguu(Ghd)UfgAfAfGfagaacuugga | | VPusCfscaaGfuUfCfucuuCfaCfaacg | | CTGCGTTGTGAAGAGAACTT | |
| 1640384 | L96 | | csasg | | GGA | |
| AD- | gscsguu(Ghd)ugAfAfGfagaacuuggaL | | VPusdCscadAgdTucucdTuCfacaacgc | | CTGCGTTGTGAAGAGAACTT | |
| 1640385 | 96 | | sasg | | GGA | |
| AD- | gsusugu(Ghd)AfaGfAfGfaacuuggaga | | VPusCfsuccAfaGfUfucucUfuCfacaa | | GCGTTGTGAAGAGAACTTGG | |
| 1640386 | L96 | | csgsc | | AGG | |
| AD- | gsusugu(Ghd)aaGfAfGfaacuuggagaL | | VPusdCsucdCadAguucdTcUfucacaac | | GCGTTGTGAAGAGAACTTGG | |
| 1640387 | 96 | | sgsc | | AGG | |
| AD- | gsusgaa(Ghd)AfgAfAfCfuuggaggaga | | VPusCfsuccUfcCfAfaguuCfuCfuuca | | TTGTGAAGAGAACTTGGAGG | |
| 1640388 | L96 | | csasa | | AGC | |
| AD- | gsusgaa(Ghd)agAfAfCfuuggaggagaL | | VPusdCsucdCudCcaagdTuCfucuucac | | TTGTGAAGAGAACTTGGAGG | |
| 1640389 | 96 | | sasa | | AGC | |
| AD- | usgsaag(Ahd)GfaAfCfUfuggaggagca | | VPusGfscudCc(Tgn)ccaaguUfcUfcu | | TGTGAAGAGAACTTGGAGGA | |
| 1640390 | L96 | | ucascsa | | GCC | |
| AD- | asgsaga(Ahd)CfuUfGfGfaggagccgaa | | VPusUfscgdGc(Tgn)ccuccaAfgUfuc | | GAAGAGAACTTGGAGGAGCC | |
| 1640391 | L96 | | ucususc | | GAG | |
| AD- | gsasgaa(Chd)UfuGfGfAfggagccgaga | | VPusCfsucgGfcUfCfcuccAfaGfuucu | | AAGAGAACTTGGAGGAGCCG | |
| 1640392 | L96 | | csusu | | AGA | |
| AD- | gsasgaa(Chd)uuGfGfAfggagccgagaL | | VPusdCsucdGgdCuccudCcAfaguucuc | | AAGAGAACTTGGAGGAGCCG | |
| 1640393 | 96 | | susu | | AGA | |
| AD- | csusugg(Ahd)GfgAfGfCfcgagauuuga | | VPusCfsaaaUfcUfCfggcuCfcUfccaa | | AACTTGGAGGAGCCGAGATT | |
| 1640394 | L96 | | gsusu | | TGC | |
| AD- | csusugg(Ahd)ggAfGfCfcgagauuugaL | | VPusdCsaadAudCucggdCuCfcuccaag | | AACTTGGAGGAGCCGAGATT | |
| 1640395 | 96 | | susu | | TGC | |
| AD- | ususgga(Ghd)GfaGfCfCfgagauuugca | | VPusGfscaaAfuCfUfcggcUfcCfucca | | ACTTGGAGGAGCCGAGATTT | |
| 1640396 | L96 | | asgsu | | GCT | |
| AD- | ususgga(Ghd)gaGfCfCfgagauuugcaL | | VPusdGscadAadTcucgdGcUfccuccaa | | ACTTGGAGGAGCCGAGATTT | |
| 1640397 | 96 | | sgsu | | GCT | |
| AD- | usgsgag(Ghd)AfgCfCfGfagauuugcua | | VPusAfsgcaAfaUfCfucggCfuCfcucc | | CTTGGAGGAGCCGAGATTTG | |
| 1640398 | L96 | | asasg | | CTC | |
| AD- | usgsgag(Ghd)agCfCfGfagauuugcuaL | | VPusdAsgcdAadAucucdGgCfuccucca | | CTTGGAGGAGCCGAGATTTG | |
| 1640399 | 96 | | sasg | | CTC | |
| AD- | gsgsagg(Ahd)GfcCfGfAfgauuugcuca | | VPusGfsagdCa(Agn)aucucgGfcUfcc | | TTGGAGGAGCCGAGATTTGC | |
| 1640400 | L96 | | uccsasa | | TCA | |
| AD- | gsgsagg(Ahd)GfcCfGfAfgauuugcuca | | VPusGfsagcAfaAfUfcucgGfcUfccuc | | TTGGAGGAGCCGAGATTTGC | |
| 1640401 | L96 | | csasa | | TCA | |
| AD- | gsgsagg(Ahd)gcCfGfAfgauuugcucaL | | VPusdGsagdCadAaucudCgGfcuccucc | | TTGGAGGAGCCGAGATTTGC | |
| 1640402 | 96 | | sasa | | TCA | |
| AD- | gsasgga(Ghd)CfcGfAfGfauuugcucaa | | VPusUfsgadGc(Agn)aaucucGfgCfuc | | TGGAGGAGCCGAGATTTGCT | |
| 1640403 | L96 | | cucscsa | | CAG | |
| AD- | gsasgcc(Ghd)AfgAfUfUfugcucaguga | | VPusCfsacdTg(Agn)gcaaauCfuCfgg | | AGGAGCCGAGATTTGCTCAG | |
| 1640404 | L96 | | cucscsu | | TGC | |
| AD- | gscscga(Ghd)AfuUfUfGfcucagugcca | | VPusGfsgcdAc(Tgn)gagcaaAfuCfuc | | GAGCCGAGATTTGCTCAGTG | |
| 1640405 | L96 | | ggcsusc | | CCA | |
| AD- | csgsaga(Uhd)UfuGfCfUfcagugccaca | | VPusGfsugdGc(Agn)cugagcAfaAfuc | | GCCGAGATTTGCTCAGTGCC | |
| 1640406 | L96 | | ucgsgsc | | ACT | |
| AD- | asusuug(Chd)UfcAfGfUfgccacuucca | | VPusGfsgadAg(Tgn)ggcacuGfaGfca | | AGATTTGCTCAGTGCCACTT | |
| 1640407 | L96 | | aauscsu | | CCC | |
| AD- | ususgcu(Chd)AfgUfGfCfcacuucccua | | VPusAfsggdGa(Agn)guggcaCfuGfag | | ATTTGCTCAGTGCCACTTCC | |
| 1640408 | L96 | | caasasu | | CTC | |
| AD- | ususgcu(Chd)AfgUfGfCfcacuucccua | | VPusAfsgggAfaGfUfggcaCfuGfagca | | ATTTGCTCAGTGCCACTTCC | |
| 1640409 | L96 | | asasu | | CTC | |
| AD- | ususgcu(Chd)agUfGfCfcacuucccuaL | | VPusdAsggdGadAguggdCaCfugagcaa | | ATTTGCTCAGTGCCACTTCC | |
| 1640410 | 96 | | sasu | | CTC | |
| AD- | usgscuc(Ahd)GfuGfCfCfacuucccuca | | VPusGfsagdGg(Agn)aguggcAfcUfga | | TTTGCTCAGTGCCACTTCCC | |
| 1640411 | L96 | | gcasasa | | TCT | |
| AD- | usgscuc(Ahd)GfuGfCfCfacuucccuca | | VPusGfsaggGfaAfGfuggcAfcUfgagc | | TTTGCTCAGTGCCACTTCCC | |
| 1640412 | L96 | | asasa | | TCT | |
| AD- | usgscuc(Ahd)guGfCfCfacuucccucaL | | VPusdGsagdGgdAagugdGcAfcugagca | | TTTGCTCAGTGCCACTTCCC | |
| 1640413 | 96 | | sasa | | TCT | |
| AD- | asgsugc(Chd)AfcUfUfCfccucuucuaa | | VPusUfsagaAfgAfGfggaaGfuGfgcac | | TCAGTGCCACTTCCCTCTTC | |
| 1640414 | L96 | | usgsa | | TAG | |
| AD- | asgsugc(Chd)acUfUfCfccucuucuaaL | | VPusdTsagdAadGagggdAaGfuggcacu | | TCAGTGCCACTTCCCTCTTC | |
| 1640415 | 96 | | sgsa | | TAG | |
| AD- | gscscac(Uhd)UfcCfCfUfcuucuaguca | | VPusGfsacuAfgAfAfgaggGfaAfgugg | | GTGCCACTTCCCTCTTCTAG | |
| 1640416 | L96 | | csasc | | TCT | |
| AD- | gscscac(Uhd)ucCfCfUfcuucuagucaL | | VPusdGsacdTadGaagadGgGfaaguggc | | GTGCCACTTCCCTCTTCTAG | |
| 1640417 | 96 | | sasc | | TCT | |
| AD- | cscsacu(Uhd)CfcCfUfCfuucuagucua | | VPusAfsgadCu(Agn)gaagagGfgAfag | | TGCCACTTCCCTCTTCTAGT | |
| 1640418 | L96 | | uggscsa | | CTG | |
| AD- | cscsacu(Uhd)CfcCfUfCfuucuagucua | | VPusAfsgacUfaGfAfagagGfgAfagug | | TGCCACTTCCCTCTTCTAGT | |
| 1640419 | L96 | | gscsa | | CTG | |
| AD- | cscsacu(Uhd)ccCfUfCfuucuagucuaL | | VPusdAsgadCudAgaagdAgGfgaagugg | | TGCCACTTCCCTCTTCTAGT | |
| 1640420 | 96 | | scsa | | CTG | |
| AD- | csascuu(Chd)CfcUfCfUfucuagucuga | | VPusCfsagdAc(Tgn)agaagaGfgGfaa | | GCCACTTCCCTCTTCTAGTC | |
| 1640421 | L96 | | gugsgsc | | TGA | |
| AD- | csascuu(Chd)CfcUfCfUfucuagucuga | | VPusCfsagaCfuAfGfaagaGfgGfaagu | | GCCACTTCCCTCTTCTAGTC | |
| 1640422 | L96 | | gsgsc | | TGA | |
| AD- | csascuu(Chd)ccUfCfUfucuagucugaL | | VPusdCsagdAcdTagaadGaGfggaagug | | GCCACTTCCCTCTTCTAGTC | |
| 1640429 | 96 | | sgsc | | TGA | |
| AD- | ascsuuc(Chd)CfuCfUfUfcuagucugaa | | VPusUfscagAfcUfAfgaagAfgGfgaag | | CCACTTCCCTCTTCTAGTCT | |
| 1640430 | L96 | | usgsg | | GAG | |
| AD- | csusucc(Chd)UfcUfUfCfuagucugaga | | VPusCfsucdAg(Agn)cuagaaGfaGfgg | | CACTTCCCTCTTCTAGTCTG | |
| 1640431 | L96 | | aagsusg | | AGA | |
| AD- | csusucc(Chd)UfcUfUfCfuagucugaga | | VPusCfsucaGfaCfUfagaaGfaGfggaa | | CACTTCCCTCTTCTAGTCTG | |
| 1640432 | L96 | | gsusg | | AGA | |
| AD- | csusucc(Chd)ucUfUfCfuagucugagaL | | VPusdCsucdAgdAcuagdAaGfagggaag | | CACTTCCCTCTTCTAGTCTG | |
| 1640433 | 96 | | susg | | AGA | |
| AD- | uscsccu(Chd)UfuCfUfAfgucugagaga | | VPusCfsucdTc(Agn)gacuagAfaGfag | | CTTCCCTCTTCTAGTCTGAG | |
| 1640434 | L96 | | ggasasg | | AGG | |
| AD- | cscsucu(Uhd)CfuAfGfUfcugagaggga | | VPusCfsccdTc(Tgn)cagacuAfgAfag | | TCCCTCTTCTAGTCTGAGAG | |
| 1640435 | L96 | | aggsgsa | | GGA | |
| AD- | cscsucu(Uhd)CfuAfGfUfcugagaggga | | VPusCfsccuCfuCfAfgacuAfgAfagag | | TCCCTCTTCTAGTCTGAGAG | |
| 1640436 | L96 | | gsgsa | | GGA | |
| AD- | cscsucu(Uhd)cuAfGfUfcugagagggaL | | VPusdCsccdTcdTcagadCuAfgaagagg | | TCCCTCTTCTAGTCTGAGAG | |
| 1640437 | 96 | | sgsa | | GGA | |
| AD- | uscsuuc(Uhd)AfgUfCfUfgagagggaaa | | VPusUfsucdCc(Tgn)cucagaCfuAfga | | CCTCTTCTAGTCTGAGAGGG | |
| 1640438 | L96 | | agasgsg | | AAG | |
| AD- | csusucu(Ahd)GfuCfUfGfagagggaaga | | VPusCfsuucCfcUfCfucagAfcUfagaa | | CTCTTCTAGTCTGAGAGGGA | |
| 1640439 | L96 | | gsasg | | AGA | |
| AD- | csusucu(Ahd)guCfUfGfagagggaagaL | | VPusdCsuudCcdCucucdAgAfcuagaag | | CTCTTCTAGTCTGAGAGGGA | |
| 1640440 | 96 | | sasg | | AGA | |
| AD- | uscsuag(Uhd)CfuGfAfGfagggaagaga | | VPusCfsucuUfcCfCfucucAfgAfcuag | | CTTCTAGTCTGAGAGGGAAG | |
| 1640441 | L96 | | asasg | | AGG | |
| AD- | uscsuag(Uhd)cuGfAfGfagggaagagaL | | VPusdCsucdTudCccucdTcAfgacuaga | | CTTCTAGTCTGAGAGGGAAG | |
| 1640442 | 96 | | sasg | | AGG | |
| AD- | csusagu(Chd)UfgAfGfAfgggaagagga | | VPusCfscudCu(Tgn)cccucuCfaGfac | | TTCTAGTCTGAGAGGGAAGA | |
| 1640443 | L96 | | uagsasa | | GGG | |
| AD- | csusagu(Chd)UfgAfGfAfgggaagagga | | VPusCfscucUfuCfCfcucuCfaGfacua | | TTCTAGTCTGAGAGGGAAGA | |
| 1640444 | L96 | | gsasa | | GGG | |
| AD- | csusagu(Chd)ugAfGfAfgggaagaggaL | | VPusdCscudCudTcccudCuCfagacuag | | TTCTAGTCTGAGAGGGAAGA | |
| 1640445 | 96 | | sasa | | GGG | |
| AD- | usasguc(Uhd)GfaGfAfGfggaagaggga | | VPusCfsccdTc(Tgn)ucccucUfcAfga | | TCTAGTCTGAGAGGGAAGAG | |
| 1640446 | L96 | | cuasgsa | | GGC | |
| AD- | usasguc(Uhd)GfaGfAfGfggaagaggga | | VPusCfsccuCfuUfCfccucUfcAfgacu | | TCTAGTCTGAGAGGGAAGAG | |
| 1640447 | L96 | | asgsa | | GGC | |
| AD- | gsuscug(Ahd)GfaGfGfGfaagagggcua | | VPusAfsgcdCc(Tgn)cuucccUfcUfca | | TAGTCTGAGAGGGAAGAGGG | |
| 1640448 | L96 | | gacsusa | | CTG | |
| AD- | uscsuga(Ghd)AfgGfGfAfagagggcuga | | VPusCfsagcCfcUfCfuuccCfuCfucag | | AGTCTGAGAGGGAAGAGGGC | |
| 1640449 | L96 | | ascsu | | TGG | |
| AD- | uscsuga(Ghd)agGfGfAfagagggcugaL | | VPusdCsagdCcdCucuudCcCfucucaga | | AGTCTGAGAGGGAAGAGGGC | |
| 1640450 | 96 | | scsu | | TGG | |
| AD- | csusgag(Ahd)GfgGfAfAfgagggcugga | | VPusCfscagCfcCfUfcuucCfcUfcuca | | GTCTGAGAGGGAAGAGGGCT | |
| 1640451 | L96 | | gsasc | | GGG | |
| AD- | csusgag(Ahd)ggGfAfAfgagggcuggaL | | VPusdCscadGcdCcucudTcCfcucucag | | GTCTGAGAGGGAAGAGGGCT | |
| 1640452 | 96 | | sasc | | GGG | |
| AD- | ususugg(Ahd)GfcUfGfGfagagauguga | | VPusCfsacaUfcUfCfuccaGfcUfccaa | | GGTTTGGAGCTGGAGAGATG | |
| 1640453 | L96 | | ascsc | | TGG | |
| AD- | ususugg(Ahd)gcUfGfGfagagaugugaL | | VPusdCsacdAudCucucdCaGfcuccaaa | | GGTTTGGAGCTGGAGAGATG | |
| 1640454 | 96 | | scSC | | TGG | |
| AD- | ususgga(Ghd)CfuGfGfAfgagaugugga | | VPusCfscacAfuCfUfcuccAfgCfucca | | GTTTGGAGCTGGAGAGATGT | |
| 1640455 | L96 | | asasc | | GGG | |
| AD- | ususgga(Ghd)cuGfGfAfgagauguggaL | | VPusdCscadCadTcucudCcAfgcuccaa | | GTTTGGAGCTGGAGAGATGT | |
| 1640456 | 96 | | sasc | | GGG | |
| AD- | gscsagu(Ghd)GfaUfGfAfcauaaugcua | | VPusAfsgcaUfuAfUfgucaUfcCfacug | | GGGCAGTGGATGACATAATG | |
| 1640457 | L96 | | cscsc | | CTT | |
| AD- | gscsagu(Ghd)gaUfGfAfcauaaugcuaL | | VPusdAsgcdAudTaugudCaUfccacugc | | GGGCAGTGGATGACATAATG | |
| 1640458 | 96 | | scsc | | CTT | |
| AD- | csasgug(Ghd)AfuGfAfCfauaaugcuua | | VPusAfsagdCa(Tgn)uaugucAfuCfca | | GGCAGTGGATGACATAATGC | |
| 1640459 | L96 | | cugscsc | | TTT | |
| AD- | csasgug(Ghd)AfuGfAfCfauaaugcuua | | VPusAfsagcAfuUfAfugucAfuCfcacu | | GGCAGTGGATGACATAATGC | |
| 1640460 | L96 | | gscsc | | TTT | |
| AD- | csasgug(Ghd)auGfAfCfauaaugcuuaL | | VPusdAsagdCadTuaugdTcAfuccacug | | GGCAGTGGATGACATAATGC | |
| 1640461 | 96 | | SCSC | | TTT | |
| AD- | usasgga(Chd)GfcCfUfCfggcgggagua | | VPusAfscucCfcGfCfcgagGfcGfuccu | | TTTAGGACGCCTCGGCGGGA | |
| 1640462 | L96 | | asasa | | GTG | |
| AD- | usgsagg(Ghd)CfgCfGfUfccaaugggaa | | VPusUfsccdCa(Tgn)uggacgCfgCfcc | | AGTGAGGGCGCGTCCAATGG | |
| 1640463 | L96 | | ucascsu | | GAG | |
| AD- | usgsagg(Ghd)CfgCfGfUfccaaugggaa | | VPusUfscccAfuUfGfgacgCfgCfccuc | | AGTGAGGGCGCGTCCAATGG | |
| 1640464 | L96 | | ascsu | | GAG | |
| AD- | usgsagg(Ghd)cgCfGfUfccaaugggaaL | | VPusdTsccdCadTuggadCgCfgcccuca | | AGTGAGGGCGCGTCCAATGG | |
| 1640465 | 96 | | scsu | | GAG | |
| AD- | gscsguc(Chd)AfaUfGfGfgagauuucua | | VPusAfsgadAa(Tgn)cucccaUfuGfga | | GCGCGTCCAATGGGAGATTT | |
| 1640466 | L96 | | cgcsgsc | | CTT | |
| AD- | gscsguc(Chd)AfaUfGfGfgagauuucua | | VPusAfsgaaAfuCfUfcccaUfuGfgacg | | GCGCGTCCAATGGGAGATTT | |
| 1640467 | L96 | | csgsc | | CTT | |
| AD- | gscsguc(Chd)aaUfGfGfgagauuucuaL | | VPusdAsgadAadTcuccdCaUfuggacgc | | GCGCGTCCAATGGGAGATTT | |
| 1640468 | 96 | | sgsc | | CTT | |
| AD- | csgsucc(Ahd)AfuGfGfGfagauuucuua | | VPusAfsagaAfaUfCfucccAfuUfggac | | CGCGTCCAATGGGAGATTTC | |
| 1640469 | L96 | | gscsg | | TTT | |
| AD- | csgsucc(Ahd)auGfGfGfagauuucuuaL | | VPusdAsagdAadAucucdCcAfuuggacg | | CGCGTCCAATGGGAGATTTC | |
| 1640470 | 96 | | scsg | | TTT | |
| AD- | csasgcc(Uhd)GfaGfAfUfuugaggcuca | | VPusGfsagdCc(Tgn)caaaucUfcAfgg | | AACAGCCTGAGATTTGAGGC | |
| 1640471 | L96 | | cugsusu | | TCT | |
| AD- | csusgag(Ahd)UfuUfGfAfggcucuucca | | VPusGfsgadAg(Agn)gccucaAfaUfcu | | GCCTGAGATTTGAGGCTCTT | |
| 1640472 | L96 | | cagsgsc | | CCT | |
| AD- | usgsaga(Uhd)UfuGfAfGfgcucuuccua | | VPusAfsggaAfgAfGfccucAfaAfucuc | | CCTGAGATTTGAGGCTCTTC | |
| 1640473 | L96 | | asgsg | | CTA | |
| AD- | usgsaga(Uhd)uuGfAfGfgcucuuccuaL | | VPusdAsggdAadGagccdTcAfaaucuca | | CCTGAGATTTGAGGCTCTTC | |
| 1640474 | 96 | | sgsg | | CTA | |
| AD- | gsasgau(Uhd)UfgAfGfGfcucuuccuaa | | VPusUfsagdGa(Agn)gagccuCfaAfau | | CTGAGATTTGAGGCTCTTCC | |
| 1640475 | L96 | | cucsasg | | TAC | |
| AD- | gsasgau(Uhd)UfgAfGfGfcucuuccuaa | | VPusUfsaggAfaGfAfgccuCfaAfaucu | | CTGAGATTTGAGGCTCTTCC | |
| 1640476 | L96 | | csasg | | TAC | |
| AD- | gsasgau(Uhd)ugAfGfGfcucuuccuaaL | | VPusdTsagdGadAgagcdCuCfaaaucuc | | CTGAGATTTGAGGCTCTTCC | |
| 1640477 | 96 | | sasg | | TAC | |
| AD- | asgsauu(Uhd)GfaGfGfCfucuuccuaca | | VPusGfsuadGg(Agn)agagccUfcAfaa | | TGAGATTTGAGGCTCTTCCT | |
| 1640478 | L96 | | ucuscsa | | ACA | |
| AD- | ususuga(Ghd)GfcUfCfUfuccuacauua | | VPusAfsaudGu(Agn)ggaagaGfcCfuc | | GATTTGAGGCTCTTCCTACA | |
| 1640479 | L96 | | aaasusc | | TTG | |
| AD- | usgsagg(Chd)UfcUfUfCfcuacauugua | | VPusAfscaaUfgUfAfggaaGfaGfccuc | | TTTGAGGCTCTTCCTACATT | |
| 1640480 | L96 | | asasa | | GTC | |
| AD- | usgsagg(Chd)ucUfUfCfcuacauuguaL | | VPusdAscadAudGuaggdAaGfagccuca | | TTTGAGGCTCTTCCTACATT | |
| 1640481 | 96 | | sasa | | GTC | |
| AD- | gsasggc(Uhd)CfuUfCfCfuacauuguca | | VPusGfsacaAfuGfUfaggaAfgAfgccu | | TTGAGGCTCTTCCTACATTG | |
| 1640482 | L96 | | csasa | | TCA | |
| AD- | gsasggc(Uhd)cuUfCfCfuacauugucaL | | VPusdGsacdAadTguagdGaAfgagccuc | | TTGAGGCTCTTCCTACATTG | |
| 1640483 | 96 | | sasa | | TCA | |
| AD- | asgsgcu(Chd)UfuCfCfUfacauugucaa | | VPusUfsgadCa(Agn)uguaggAfaGfag | | TGAGGCTCTTCCTACATTGT | |
| 1640484 | L96 | | ccuscsa | | CAG | |
| AD- | asgsgcu(Chd)UfuCfCfUfacauugucaa | | VPusUfsgacAfaUfGfuaggAfaGfagcc | | TGAGGCTCTTCCTACATTGT | |
| 1640485 | L96 | | uscsa | | CAG | |
| AD- | asgsgcu(Chd)uuCfCfUfacauugucaaL | | VPusdTsgadCadAuguadGgAfagagccu | | TGAGGCTCTTCCTACATTGT | |
| 1640486 | 96 | | scsa | | CAG | |
| AD- | gsgscuc(Uhd)UfcCfUfAfcauugucaga | | VPusCfsugaCfaAfUfguagGfaAfgagc | | GAGGCTCTTCCTACATTGTC | |
| 1640487 | L96 | | csusc | | AGG | |
| AD- | gsgscuc(Uhd)ucCfUfAfcauugucagaL | | VPusdCsugdAcdAaugudAgGfaagagcc | | GAGGCTCTTCCTACATTGTC | |
| 1640488 | 96 | | susc | | AGG | |
| AD- | gscsucu(Uhd)CfcUfAfCfauugucagga | | VPusCfscugAfcAfAfuguaGfgAfagag | | AGGCTCTTCCTACATTGTCA | |
| 1640489 | L96 | | cscsu | | GGA | |
| AD- | gscsucu(Uhd)ccUfAfCfauugucaggaL | | VPusdCscudGadCaaugdTaGfgaagagc | | AGGCTCTTCCTACATTGTCA | |
| 1640490 | 96 | | scsu | | GGA | |
| AD- | csuscuu(Chd)CfuAfCfAfuugucaggaa | | VPusUfsccdTg(Agn)caauguAfgGfaa | | GGCTCTTCCTACATTGTCAG | |
| 1640491 | L96 | | gagscsc | | GAC | |
| AD- | csusucc(Uhd)AfcAfUfUfgucaggacaa | | VPusUfsgudCc(Tgn)gacaauGfuAfgg | | CTCTTCCTACATTGTCAGGA | |
| 1640492 | L96 | | aagsasg | | CAT | |
| AD- | usascau(Uhd)GfuCfAfGfgacauuucaa | | VPusUfsgadAa(Tgn)guccugAfcAfau | | CCTACATTGTCAGGACATTT | |
| 1640493 | L96 | | guasgsg | | CAT | |
| AD- | usascau(Uhd)GfuCfAfGfgacauuucaa | | VPusUfsgaaAfuGfUfccugAfcAfaugu | | CCTACATTGTCAGGACATTT | |
| 1640494 | L96 | | asgsg | | CAT | |
| AD- | usascau(Uhd)guCfAfGfgacauuucaaL | | VPusdTsgadAadTguccdTgAfcaaugua | | CCTACATTGTCAGGACATTT | |
| 1640495 | 96 | | sgsg | | CAT | |
| AD- | ascsauu(Ghd)UfcAfGfGfacauuucaua | | VPusAfsugaAfaUfGfuccuGfaCfaaug | | CTACATTGTCAGGACATTTC | |
| 1640496 | L96 | | usasg | | ATT | |
| AD- | ascsauu(Ghd)ucAfGfGfacauuucauaL | | VPusdAsugdAadAugucdCuGfacaaugu | | CTACATTGTCAGGACATTTC | |
| 1640497 | 96 | | sasg | | ATT | |
| AD- | csasuug(Uhd)CfaGfGfAfcauuucauua | | VPusAfsaugAfaAfUfguccUfgAfcaau | | TACATTGTCAGGACATTTCA | |
| 1640498 | L96 | | gsusa | | TTT | |
| AD- | csasuug(Uhd)caGfGfAfcauuucauuaL | | VPusdAsaudGadAaugudCcUfgacaaug | | TACATTGTCAGGACATTTCA | |
| 1640499 | 96 | | susa | | TTT | |
| AD- | ususguc(Ahd)GfgAfCfAfuuucauuuaa | | VPusUfsaaaUfgAfAfauguCfcUfgaca | | CATTGTCAGGACATTTCATT | |
| 1640500 | L96 | | asusg | | TAG | |
| AD- | ususguc(Ahd)ggAfCfAfuuucauuuaaL | | VPusdTsaadAudGaaaudGuCfcugacaa | | CATTGTCAGGACATTTCATT | |
| 1640501 | 96 | | susg | | TAG | |
| AD- | uscsagg(Ahd)CfaUfUfUfcauuuaguua | | VPusAfsacuAfaAfUfgaaaUfgUfccug | | TGTCAGGACATTTCATTTAG | |
| 1640502 | L96 | | ascsa | | TTC | |
| AD- | uscsagg(Ahd)caUfUfUfcauuuaguuaL | | VPusdAsacdTadAaugadAaUfguccuga | | TGTCAGGACATTTCATTTAG | |
| 1640503 | 96 | | scsa | | TTC | |
| AD- | csasgga(Chd)AfuUfUfCfauuuaguuca | | VPusGfsaacUfaAfAfugaaAfuGfuccu | | GTCAGGACATTTCATTTAGT | |
| 1640504 | L96 | | gsasc | | TCA | |
| AD- | csasgga(Chd)auUfUfCfauuuaguucaL | | VPusdGsaadCudAaaugdAaAfuguccug | | GTCAGGACATTTCATTTAGT | |
| 1640505 | 96 | | sasc | | TCA | |
| AD- | asgsgac(Ahd)UfuUfCfAfuuuaguucaa | | VPusUfsgadAc(Tgn)aaaugaAfaUfgu | | TCAGGACATTTCATTTAGTT | |
| 1640506 | L96 | | ccusgsa | | CAT | |
| AD- | gsgsaca(Uhd)UfuCfAfUfuuaguucaua | | VPusAfsugaAfcUfAfaaugAfaAfuguc | | CAGGACATTTCATTTAGTTC | |
| 1640507 | L96 | | csusg | | ATG | |
| AD- | gsgsaca(Uhd)uuCfAfUfuuaguucauaL | | VPusdAsugdAadCuaaadTgAfaaugucc | | CAGGACATTTCATTTAGTTC | |
| 1640508 | 96 | | susg | | ATG | |
| AD- | ascsauu(Uhd)CfaUfUfUfaguucaugaa | | VPusUfscadTg(Agn)acuaaaUfgAfaa | | GGACATTTCATTTAGTTCAT | |
| 1640509 | L96 | | uguscsc | | GAT | |
| AD- | ascsauu(Uhd)CfaUfUfUfaguucaugaa | | VPusUfscauGfaAfCfuaaaUfgAfaaug | | GGACATTTCATTTAGTTCAT | |
| 1640510 | L96 | | uscsc | | GAT | |
| AD- | ususuca(Uhd)UfuAfGfUfucaugaucaa | | VPusUfsgadTc(Agn)ugaacuAfaAfug | | CATTTCATTTAGTTCATGAT | |
| 1640511 | L96 | | aaasusg | | CAC | |
| AD- | uscsauu(Uhd)AfgUfUfCfaugaucacga | | VPusCfsgudGa(Tgn)caugaaCfuAfaa | | TTTCATTTAGTTCATGATCA | |
| 1640512 | L96 | | ugasasa | | CGG | |
| AD- | uscsauu(Uhd)AfgUfUfCfaugaucacga | | VPusCfsgugAfuCfAfugaaCfuAfaaug | | TTTCATTTAGTTCATGATCA | |
| 1640513 | L96 | | asasa | | CGG | |
| AD- | csasuuu(Ahd)GfuUfCfAfugaucacgga | | VPusCfscgdTg(Agn)ucaugaAfcUfaa | | TTCATTTAGTTCATGATCAC | |
| 1640514 | L96 | | augsasa | | GGT | |
| AD- | csasuuu(Ahd)GfuUfCfAfugaucacgga | | VPusCfscguGfaUfCfaugaAfcUfaaau | | TTCATTTAGTTCATGATCAC | |
| 1640515 | L96 | | gsasa | | GGT | |
| AD- | csasuuu(Ahd)guUfCfAfugaucacggaL | | VPusdCscgdTgdAucaudGaAfcuaaaug | | TTCATTTAGTTCATGATCAC | |
| 1640516 | 96 | | sasa | | GGT | |
| AD- | asusuua(Ghd)UfuCfAfUfgaucacggua | | VPusAfsccgUfgAfUfcaugAfaCfuaaa | | TCATTTAGTTCATGATCACG | |
| 1640517 | L96 | | usgsa | | GTG | |
| AD- | asusuua(Ghd)uuCfAfUfgaucacgguaL | | VPusdAsccdGudGaucadTgAfacuaaau | | TCATTTAGTTCATGATCACG | |
| 1640518 | 96 | | sgsa | | GTG | |
| AD- | ususuag(Uhd)UfcAfUfGfaucacgguga | | VPusCfsaccGfuGfAfucauGfaAfcuaa | | CATTTAGTTCATGATCACGG | |
| 1640519 | L96 | | asusg | | TGG | |
| AD- | ususuag(Uhd)ucAfUfGfaucacggugaL | | VPusdCsacdCgdTgaucdAuGfaacuaaa | | CATTTAGTTCATGATCACGG | |
| 1640520 | 96 | | susg | | TGG | |
| AD- | ususagu(Uhd)CfaUfGfAfucacggugga | | VPusCfscacCfgUfGfaucaUfgAfacua | | ATTTAGTTCATGATCACGGT | |
| 1640521 | L96 | | asasu | | GGT | |
| AD- | ususagu(Uhd)caUfGfAfucacgguggaL | | VPusdCscadCcdGugaudCaUfgaacuaa | | ATTTAGTTCATGATCACGGT | |
| 1640522 | 96 | | sasu | | GGT | |
| AD- | usasguu(Chd)AfuGfAfUfcacgguggua | | VPusAfsccaCfcGfUfgaucAfuGfaacu | | TTTAGTTCATGATCACGGTG | |
| 1640523 | L96 | | asasa | | GTA | |
| AD- | usasguu(Chd)auGfAfUfcacggugguaL | | VPusdAsccdAcdCgugadTcAfugaacua | | TTTAGTTCATGATCACGGTG | |
| 1640524 | 96 | | sasa | | GTA | |
| AD- | asgsuuc(Ahd)UfgAfUfCfacggugguaa | | VPusUfsaccAfcCfGfugauCfaUfgaac | | TTAGTTCATGATCACGGTGG | |
| 1640525 | L96 | | usasa | | TAG | |
| AD- | gsusuca(Uhd)GfaUfCfAfcggugguaga | | VPusCfsuacCfaCfCfgugaUfcAfugaa | | TAGTTCATGATCACGGTGGT | |
| 1640526 | L96 | | csusa | | AGT | |
| AD- | gsusuca(Uhd)gaUfCfAfcggugguagaL | | VPusdCsuadCcdAccgudGaUfcaugaac | | TAGTTCATGATCACGGTGGT | |
| 1640527 | 96 | | susa | | AGT | |
| AD- | csasuga(Uhd)CfaCfGfGfugguaguaaa | | VPusUfsuadCu(Agn)ccaccgUfgAfuc | | TTCATGATCACGGTGGTAGT | |
| 1640528 | L96 | | augsasa | | AAC | |
| AD- | asusgau(Chd)AfcGfGfUfgguaguaaca | | VPusGfsuudAc(Tgn)accaccGfuGfau | | TCATGATCACGGTGGTAGTA | |
| 1640529 | L96 | | causgsa | | ACA | |
| AD- | gsasuca(Chd)GfgUfGfGfuaguaacaca | | VPusGfsugdTu(Agn)cuaccaCfcGfug | | ATGATCACGGTGGTAGTAAC | |
| 1640530 | L96 | | aucsasu | | ACG | |
| AD- | gsasuca(Chd)GfgUfGfGfuaguaacaca | | VPusGfsuguUfaCfUfaccaCfcGfugau | | ATGATCACGGTGGTAGTAAC | |
| 1640531 | L96 | | csasu | | ACG | |
| AD- | gsasuca(Chd)ggUfGfGfuaguaacacaL | | VPusdGsugdTudAcuacdCaCfcgugauc | | ATGATCACGGTGGTAGTAAC | |
| 1640532 | 96 | | sasu | | ACG | |
| AD- | asuscac(Ghd)GfuGfGfUfaguaacacga | | VPusCfsgudGu(Tgn)acuaccAfcCfgu | | TGATCACGGTGGTAGTAACA | |
| 1640533 | L96 | | gauscsa | | CGA | |
| AD- | asuscac(Ghd)GfuGfGfUfaguaacacga | | VPusCfsgugUfuAfCfuaccAfcCfguga | | TGATCACGGTGGTAGTAACA | |
| 1640534 | L96 | | uscsa | | CGA | |
| AD- | asuscac(Ghd)guGfGfUfaguaacacgaL | | VPusdCsgudGudTacuadCcAfccgugau | | TGATCACGGTGGTAGTAACA | |
| 1640535 | 96 | | scsa | | CGA | |
| AD- | uscsacg(Ghd)UfgGfUfAfguaacacgaa | | VPusUfscgdTg(Tgn)uacuacCfaCfcg | | GATCACGGTGGTAGTAACAC | |
| 1640536 | L96 | | ugasusc | | GAT | |
| AD- | csascgg(Uhd)GfgUfAfGfuaacacgaua | | VPusAfsucgUfgUfUfacuaCfcAfccgu | | ATCACGGTGGTAGTAACACG | |
| 1640537 | L96 | | gsasu | | ATT | |
| AD- | ascsggu(Ghd)GfuAfGfUfaacacgauua | | VPusAfsaucGfuGfUfuacuAfcCfaccg | | TCACGGTGGTAGTAACACGA | |
| 1640538 | L96 | | usgsa | | TTT | |
| AD- | ascsggu(Ghd)guAfGfUfaacacgauuaL | | VPusdAsaudCgdTguuadCuAfccaccgu | | TCACGGTGGTAGTAACACGA | |
| 1640539 | 96 | | sgsa | | TTT | |
| AD- | gscsacc(Ahd)CfcUfAfAfgagaucugca | | VPusGfscadGa(Tgn)cucuuaGfgUfgg | | AAGCACCACCTAAGAGATCT | |
| 1640540 | L96 | | ugcsusu | | GCT | |
| AD- | csascca(Chd)CfuAfAfGfagaucugcua | | VPusAfsgcdAg(Agn)ucucuuAfgGfug | | AGCACCACCTAAGAGATCTG | |
| 1640541 | L96 | | gugscsu | | CTC | |
| AD- | cscsacc(Uhd)AfaGfAfGfaucugcucaa | | VPusUfsgadGc(Agn)gaucucUfuAfgg | | CACCACCTAAGAGATCTGCT | |
| 1640542 | L96 | | uggsusg | | CAT | |
| AD- | cscsuaa(Ghd)AfgAfUfCfugcucaucua | | VPusAfsgadTg(Agn)gcagauCfuCfuu | | CACCTAAGAGATCTGCTCAT | |
| 1640543 | L96 | | aggsusg | | CTA | |
| AD- | usasaga(Ghd)AfuCfUfGfcucaucuaaa | | VPusUfsuadGa(Tgn)gagcagAfuCfuc | | CCTAAGAGATCTGCTCATCT | |
| 1640544 | L96 | | uuasgsg | | AAG | |
| AD- | asasgag(Ahd)UfcUfGfCfucaucuaaga | | VPusCfsuudAg(Agn)ugagcaGfaUfcu | | CTAAGAGATCTGCTCATCTA | |
| 1640545 | L96 | | cuusasg | | AGC | |
| AD- | asasgag(Ahd)UfcUfGfCfucaucuaaga | | VPusCfsuuaGfaUfGfagcaGfaUfcucu | | CTAAGAGATCTGCTCATCTA | |
| 1640546 | L96 | | usasg | | AGC | |
| AD- | asasgag(Ahd)ucUfGfCfucaucuaagaL | | VPusdCsuudAgdAugagdCaGfaucucuu | | CTAAGAGATCTGCTCATCTA | |
| 1640547 | 96 | | sasg | | AGC | |
| AD- | asgsaga(Uhd)CfuGfCfUfcaucuaagca | | VPusGfscuuAfgAfUfgagcAfgAfucuc | | TAAGAGATCTGCTCATCTAA | |
| 1640548 | L96 | | ususa | | GCC | |
| AD- | asgsaga(Uhd)cuGfCfUfcaucuaagcaL | | VPusdGscudTadGaugadGcAfgaucucu | | TAAGAGATCTGCTCATCTAA | |
| 1640549 | 96 | | susa | | GCC | |
| AD- | gsasgau(Chd)UfgCfUfCfaucuaagcca | | VPusGfsgcdTu(Agn)gaugagCfaGfau | | AAGAGATCTGCTCATCTAAG | |
| 1640550 | L96 | | cucsusu | | CCT | |
| AD- | gsasgau(Chd)UfgCfUfCfaucuaagcca | | VPusGfsgcuUfaGfAfugagCfaGfaucu | | AAGAGATCTGCTCATCTAAG | |
| 1640551 | L96 | | csusu | | CCT | |
| AD- | asgsauc(Uhd)GfcUfCfAfucuaagccua | | VPusAfsggdCu(Tgn)agaugaGfcAfga | | AGAGATCTGCTCATCTAAGC | |
| 1640552 | L96 | | ucuscsu | | CTA | |
| AD- | gsasucu(Ghd)CfuCfAfUfcuaagccuaa | | VPusUfsagdGc(Tgn)uagaugAfgCfag | | GAGATCTGCTCATCTAAGCC | |
| 1640553 | L96 | | aucsusc | | TAA | |
| AD- | csusgcu(Chd)AfuCfUfAfagccuaagua | | VPusAfscuuAfgGfCfuuagAfuGfagca | | ATCTGCTCATCTAAGCCTAA | |
| 1640554 | L96 | | gsasu | | GTT | |
| AD- | csusgcu(Chd)auCfUfAfagccuaaguaL | | VPusdAscudTadGgcuudAgAfugagcag | | ATCTGCTCATCTAAGCCTAA | |
| 1640555 | 96 | | sasu | | GTT | |
| AD- | usgscuc(Ahd)UfcUfAfAfgccuaaguua | | VPusAfsacdTu(Agn)ggcuuaGfaUfga | | TCTGCTCATCTAAGCCTAAG | |
| 1640556 | L96 | | gcasgsa | | TTG | |
| AD- | usgscuc(Ahd)UfcUfAfAfgccuaaguua | | VPusAfsacuUfaGfGfcuuaGfaUfgagc | | TCTGCTCATCTAAGCCTAAG | |
| 1640557 | L96 | | asgsa | | TTG | |
| AD- | usgscuc(Ahd)ucUfAfAfgccuaaguuaL | | VPusdAsacdTudAggcudTaGfaugagca | | TCTGCTCATCTAAGCCTAAG | |
| 1640558 | 96 | | sgsa | | TTG | |
| AD- | gscsuca(Uhd)CfuAfAfGfccuaaguuga | | VPusCfsaacUfuAfGfgcuuAfgAfugag | | CTGCTCATCTAAGCCTAAGT | |
| 1640559 | L96 | | csasg | | TGG | |
| AD- | gscsuca(Uhd)cuAfAfGfccuaaguugaL | | VPusdCsaadCudTaggcdTuAfgaugagc | | CTGCTCATCTAAGCCTAAGT | |
| 1640560 | 96 | | sasg | | TGG | |
| AD- | csuscau(Chd)UfaAfGfCfcuaaguugga | | VPusCfscaaCfuUfAfggcuUfaGfauga | | TGCTCATCTAAGCCTAAGTT | |
| 1640561 | L96 | | gscsa | | GGT | |
| AD- | csuscau(Chd)uaAfGfCfcuaaguuggaL | | VPusdCscadAcdTuaggdCuUfagaugag | | TGCTCATCTAAGCCTAAGTT | |
| 1640562 | 96 | | scsa | | GGT | |
| AD- | uscsauc(Uhd)AfaGfCfCfuaaguuggua | | VPusAfsccaAfcUfUfaggcUfuAfgaug | | GCTCATCTAAGCCTAAGTTG | |
| 1640563 | L96 | | asgsc | | GTC | |
| AD- | uscsauc(Uhd)aaGfCfCfuaaguugguaL | | VPusdAsccdAadCuuagdGcUfuagauga | | GCTCATCTAAGCCTAAGTTG | |
| 1640564 | 96 | | sgsc | | GTC | |
| AD- | csasucu(Ahd)AfgCfCfUfaaguugguca | | VPusGfsacdCa(Agn)cuuaggCfuUfag | | CTCATCTAAGCCTAAGTTGG | |
| 1640565 | L96 | | augsasg | | TCT | |
| AD- | csasucu(Ahd)AfgCfCfUfaaguugguca | | VPusGfsaccAfaCfUfuaggCfuUfagau | | CTCATCTAAGCCTAAGTTGG | |
| 1640566 | L96 | | gsasg | | TCT | |
| AD- | csasucu(Ahd)agCfCfUfaaguuggucaL | | VPusdGsacdCadAcuuadGgCfuuagaug | | CTCATCTAAGCCTAAGTTGG | |
| 1640567 | 96 | | sasg | | TCT | |
| AD- | asuscua(Ahd)GfcCfUfAfaguuggucua | | VPusAfsgacCfaAfCfuuagGfcUfuaga | | TCATCTAAGCCTAAGTTGGT | |
| 1640568 | L96 | | usgsa | | CTG | |
| AD- | asuscua(Ahd)gcCfUfAfaguuggucuaL | | VPusdAsgadCcdAacuudAgGfcuuagau | | TCATCTAAGCCTAAGTTGGT | |
| 1640569 | 96 | | sgsa | | CTG | |
| AD- | uscsuaa(Ghd)CfcUfAfAfguuggucuga | | VPusCfsagaCfcAfAfcuuaGfgCfuuag | | CATCTAAGCCTAAGTTGGTC | |
| 1640570 | L96 | | asusg | | TGC | |
| AD- | uscsuaa(Ghd)ccUfAfAfguuggucugaL | | VPusdCsagdAcdCaacudTaGfgcuuaga | | CATCTAAGCCTAAGTTGGTC | |
| 1640571 | 96 | | susg | | TGC | |
| AD- | csusaag(Chd)CfuAfAfGfuuggucugca | | VPusGfscagAfcCfAfacuuAfgGfcuua | | ATCTAAGCCTAAGTTGGTCT | |
| 1640572 | L96 | | gsasu | | GCA | |
| AD- | usasagc(Chd)UfaAfGfUfuggucugcaa | | VPusUfsgcdAg(Agn)ccaacuUfaGfgc | | TCTAAGCCTAAGTTGGTCTG | |
| 1640573 | L96 | | uuasgsa | | CAG | |
| AD- | asgsccu(Ahd)AfgUfUfGfgucugcagga | | VPusCfscudGc(Agn)gaccaaCfuUfag | | TAAGCCTAAGTTGGTCTGCA | |
| 1640574 | L96 | | gcususa | | GGC | |
| AD- | cscsuaa(Ghd)UfuGfGfUfcugcaggcga | | VPusCfsgccUfgCfAfgaccAfaCfuuag | | AGCCTAAGTTGGTCTGCAGG | |
| 1640575 | L96 | | gscsu | | CGT | |
| AD- | csusaag(Uhd)UfgGfUfCfugcaggcgua | | VPusAfscgdCc(Tgn)gcagacCfaAfcu | | GCCTAAGTTGGTCTGCAGGC | |
| 1640576 | L96 | | uagsgsc | | GTT | |
| AD- | usasagu(Uhd)GfgUfCfUfgcaggcguua | | VPusAfsacgCfcUfGfcagaCfcAfacuu | | CCTAAGTTGGTCTGCAGGCG | |
| 1640577 | L96 | | asgsg | | TTT | |
| AD- | usasagu(Uhd)ggUfCfUfgcaggcguuaL | | VPusdAsacdGcdCugcadGaCfcaacuua | | CCTAAGTTGGTCTGCAGGCG | |
| 1640578 | 96 | | sgsg | | TTT | |
| AD- | asgsuug(Ghd)UfcUfGfCfaggcguuuga | | VPusCfsaaaCfgCfCfugcaGfaCfcaac | | TAAGTTGGTCTGCAGGCGTT | |
| 1640579 | L96 | | ususa | | TGA | |
| AD- | asgsuug(Ghd)ucUfGfCfaggcguuugaL | | VPusdCsaadAcdGccugdCaGfaccaacu | | TAAGTTGGTCTGCAGGCGTT | |
| 1640580 | 96 | | susa | | TGA | |
| AD- | usgsguc(Uhd)GfcAfGfGfcguuugaaua | | VPusAfsuucAfaAfCfgccuGfcAfgacc | | GTTGGTCTGCAGGCGTTTGA | |
| 1640581 | L96 | | asasc | | ATG | |
| AD- | usgsguc(Uhd)gcAfGfGfcguuugaauaL | | VPusdAsuudCadAacgcdCuGfcagacca | | GTTGGTCTGCAGGCGTTTGA | |
| 1640582 | 96 | | sasc | | ATG | |
| AD- | gsgsucu(Ghd)CfaGfGfCfguuugaauga | | VPusCfsaudTc(Agn)aacgccUfgCfag | | TTGGTCTGCAGGCGTTTGAA | |
| 1640583 | L96 | | accsasa | | TGA | |
| AD- | gsgsucu(Ghd)CfaGfGfCfguuugaauga | | VPusCfsauuCfaAfAfcgccUfgCfagac | | TTGGTCTGCAGGCGTTTGAA | |
| 1640584 | L96 | | csasa | | TGA | |
| AD- | gsgsucu(Ghd)caGfGfCfguuugaaugaL | | VPusdCsaudTcdAaacgdCcUfgcagacc | | TTGGTCTGCAGGCGTTTGAA | |
| 1640585 | 96 | | sasa | | TGA | |
| AD- | uscsugc(Ahd)GfgCfGfUfuugaaugaga | | VPusCfsucaUfuCfAfaacgCfcUfgcag | | GGTCTGCAGGCGTTTGAATG | |
| 1640586 | L96 | | ascsc | | AGT | |
| AD- | uscsugc(Ahd)ggCfGfUfuugaaugagaL | | VPusdCsucdAudTcaaadCgCfcugcaga | | GGTCTGCAGGCGTTTGAATG | |
| 1640587 | 96 | | scsc | | AGT | |
| AD- | csusgca(Ghd)GfcGfUfUfugaaugagua | | VPusAfscudCa(Tgn)ucaaacGfcCfug | | GTCTGCAGGCGTTTGAATGA | |
| 1640588 | L96 | | cagsasc | | GTT | |
| AD- | csusgca(Ghd)GfcGfUfUfugaaugagua | | VPusAfscucAfuUfCfaaacGfcCfugca | | GTCTGCAGGCGTTTGAATGA | |
| 1640589 | L96 | | gsasc | | GTT | |
| AD- | csusgca(Ghd)gcGfUfUfugaaugaguaL | | VPusdAscudCadTucaadAcGfccugcag | | GTCTGCAGGCGTTTGAATGA | |
| 1640590 | 96 | | sasc | | GTT | |
| AD- | usgscag(Ghd)CfgUfUfUfgaaugaguua | | VPusAfsacdTc(Agn)uucaaaCfgCfcu | | TCTGCAGGCGTTTGAATGAG | |
| 1640591 | L96 | | gcasgsa | | TTG | |
| AD- | gscsagg(Chd)GfuUfUfGfaaugaguuga | | VPusCfsaacUfcAfUfucaaAfcGfccug | | CTGCAGGCGTTTGAATGAGT | |
| 1640592 | L96 | | csasg | | TGT | |
| AD- | gscsagg(Chd)guUfUfGfaaugaguugaL | | VPusdCsaadCudCauucdAaAfcgccugc | | CTGCAGGCGTTTGAATGAGT | |
| 1640593 | 96 | | sasg | | TGT | |
| AD- | csasggc(Ghd)UfuUfGfAfaugaguugua | | VPusAfscadAc(Tgn)cauucaAfaCfgc | | TGCAGGCGTTTGAATGAGTT | |
| 1640594 | L96 | | cugscsa | | GTG | |
| AD- | csasggc(Ghd)UfuUfGfAfaugaguugua | | VPusAfscaaCfuCfAfuucaAfaCfgccu | | TGCAGGCGTTTGAATGAGTT | |
| 1640595 | L96 | | gscsa | | GTG | |
| AD- | csasggc(Ghd)uuUfGfAfaugaguuguaL | | VPusdAscadAcdTcauudCaAfacgccug | | TGCAGGCGTTTGAATGAGTT | |
| 1640596 | 96 | | scsa | | GTG | |
| AD- | asgsgcg(Uhd)UfuGfAfAfugaguuguga | | VPusCfsacaAfcUfCfauucAfaAfcgcc | | GCAGGCGTTTGAATGAGTTG | |
| 1640597 | L96 | | usgsc | | TGG | |
| AD- | asgsgcg(Uhd)uuGfAfAfugaguugugaL | | VPusdCsacdAadCucaudTcAfaacgccu | | GCAGGCGTTTGAATGAGTTG | |
| 1640598 | 96 | | sgsc | | TGG | |
| AD- | gscsguu(Uhd)GfaAfUfGfaguuguggua | | VPusAfsccaCfaAfCfucauUfcAfaacg | | AGGCGTTTGAATGAGTTGTG | |
| 1640599 | L96 | | cscsu | | GTT | |
| AD- | gscsguu(Uhd)gaAfUfGfaguugugguaL | | VPusdAsccdAcdAacucdAuUfcaaacgc | | AGGCGTTTGAATGAGTTGTG | |
| 1640600 | 96 | | scsu | | GTT | |
| AD- | gsusuug(Ahd)AfuGfAfGfuugugguuga | | VPusCfsaacCfaCfAfacucAfuUfcaaa | | GCGTTTGAATGAGTTGTGGT | |
| 1640601 | L96 | | csgsc | | TGC | |
| AD- | gsusuug(Ahd)auGfAfGfuugugguugaL | | VPusdCsaadCcdAcaacdTcAfuucaaac | | GCGTTTGAATGAGTTGTGGT | |
| 1640602 | 96 | | sgsc | | TGC | |
| AD- | ususuga(Ahd)UfgAfGfUfugugguugca | | VPusGfscaaCfcAfCfaacuCfaUfucaa | | CGTTTGAATGAGTTGTGGTT | |
| 1640603 | L96 | | ascsg | | GCC | |
| AD- | ususuga(Ahd)ugAfGfUfugugguugcaL | | VPusdGscadAcdCacaadCuCfauucaaa | | CGTTTGAATGAGTTGTGGTT | |
| 1640604 | 96 | | scsg | | GCC | |
| AD- | ususgaa(Uhd)GfaGfUfUfgugguugcca | | VPusGfsgcaAfcCfAfcaacUfcAfuuca | | GTTTGAATGAGTTGTGGTTG | |
| 1640605 | L96 | | asasc | | CCA | |
| AD- | ususgaa(Uhd)gaGfUfUfgugguugccaL | | VPusdGsgcdAadCcacadAcUfcauucaa | | GTTTGAATGAGTTGTGGTTG | |
| 1640606 | 96 | | sasc | | CCA | |
| AD- | usgsaau(Ghd)AfgUfUfGfugguugccaa | | VPusUfsggdCa(Agn)ccacaaCfuCfau | | TTTGAATGAGTTGTGGTTGC | |
| 1640607 | L96 | | ucasasa | | CAA | |
| AD- | gsasguu(Ghd)UfgGfUfUfgccaaguaaa | | VPusUfsuadCu(Tgn)ggcaacCfaCfaa | | ATGAGTTGTGGTTGCCAAGT | |
| 1640608 | L96 | | cucsasu | | AAA | |
| AD- | asgsuug(Uhd)GfgUfUfGfccaaguaaaa | | VPusUfsuudAc(Tgn)uggcaaCfcAfca | | TGAGTTGTGGTTGCCAAGTA | |
| 1640609 | L96 | | acuscsa | | AAG | |
| AD- | gsusugu(Ghd)GfuUfGfCfcaaguaaaga | | VPusCfsuuuAfcUfUfggcaAfcCfacaa | | GAGTTGTGGTTGCCAAGTAA | |
| 1640610 | L96 | | csusc | | AGT | |
| AD- | gsusugu(Ghd)guUfGfCfcaaguaaagaL | | VPusdCsuudTadCuuggdCaAfccacaac | | GAGTTGTGGTTGCCAAGTAA | |
| 1640611 | 96 | | susc | | AGT | |
| AD- | ususgug(Ghd)UfuGfCfCfaaguaaagua | | VPusAfscuuUfaCfUfuggcAfaCfcaca | | AGTTGTGGTTGCCAAGTAAA | |
| 1640612 | L96 | | ascsu | | GTG | |
| AD- | ususgug(Ghd)uuGfCfCfaaguaaaguaL | | VPusdAscudTudAcuugdGcAfaccacaa | | AGTTGTGGTTGCCAAGTAAA | |
| 1640613 | 96 | | scsu | | GTG | |
| AD- | usgsguu(Ghd)CfcAfAfGfuaaaguggua | | VPusAfsccdAc(Tgn)uuacuuGfgCfaa | | TGTGGTTGCCAAGTAAAGTG | |
| 1640614 | L96 | | ccascsa | | GTG | |
| AD- | usgsguu(Ghd)CfcAfAfGfuaaaguggua | | VPusAfsccaCfuUfUfacuuGfgCfaacc | | TGTGGTTGCCAAGTAAAGTG | |
| 1640615 | L96 | | ascsa | | GTG | |
| AD- | usgsguu(Ghd)ccAfAfGfuaaagugguaL | | VPusdAsccdAcdTuuacdTuGfgcaacca | | TGTGGTTGCCAAGTAAAGTG | |
| 1640616 | 96 | | scsa | | GTG | |
| AD- | gsgsuug(Chd)CfaAfGfUfaaagugguga | | VPusCfsaccAfcUfUfuacuUfgGfcaac | | GTGGTTGCCAAGTAAAGTGG | |
| 1640617 | L96 | | csasc | | TGA | |
| AD- | gsgsuug(Chd)caAfGfUfaaaguggugaL | | VPusdCsacdCadCuuuadCuUfggcaacc | | GTGGTTGCCAAGTAAAGTGG | |
| 1640618 | 96 | | sasc | | TGA | |
| AD- | gscscaa(Ghd)UfaAfAfGfuggugaacua | | VPusAfsgudTc(Agn)ccacuuUfaCfuu | | TTGCCAAGTAAAGTGGTGAA | |
| 1640619 | L96 | | ggcsasa | | CTT | |
| AD- | csasagu(Ahd)AfaGfUfGfgugaacuuaa | | VPusUfsaadGu(Tgn)caccacUfuUfac | | GCCAAGTAAAGTGGTGAACT | |
| 1640620 | L96 | | uugsgsc | | TAC | |
| AD- | asasgua(Ahd)AfgUfGfGfugaacuuaca | | VPusGfsuadAg(Tgn)ucaccaCfuUfua | | CCAAGTAAAGTGGTGAACTT | |
| 1640621 | L96 | | cuusgsg | | ACG | |
| AD- | asgsuaa(Ahd)GfuGfGfUfgaacuuacga | | VPusCfsguaAfgUfUfcaccAfcUfuuac | | CAAGTAAAGTGGTGAACTTA | |
| 1640622 | L96 | | ususg | | CGT | |
| AD- | asgsuaa(Ahd)guGfGfUfgaacuuacgaL | | VPusdCsgudAadGuucadCcAfcuuuacu | | CAAGTAAAGTGGTGAACTTA | |
| 1640623 | 96 | | susg | | CGT | |
| AD- | gsusaaa(Ghd)UfgGfUfGfaacuuacgua | | VPusAfscguAfaGfUfucacCfaCfuuua | | AAGTAAAGTGGTGAACTTAC | |
| 1640624 | L96 | | csusu | | GTG | |
| AD- | gsusaaa(Ghd)ugGfUfGfaacuuacguaL | | VPusdAscgdTadAguucdAcCfacuuuac | | AAGTAAAGTGGTGAACTTAC | |
| 1640625 | 96 | | susu | | GTG | |
| AD- | usasaag(Uhd)GfgUfGfAfacuuacguga | | VPusCfsacgUfaAfGfuucaCfcAfcuuu | | AGTAAAGTGGTGAACTTACG | |
| 1640626 | L96 | | ascsu | | TGG | |
| AD- | usasaag(Uhd)ggUfGfAfacuuacgugaL | | VPusdCsacdGudAaguudCaCfcacuuua | | AGTAAAGTGGTGAACTTACG | |
| 1640627 | 96 | | scsu | | TGG | |
| AD- | asasagu(Ghd)GfuGfAfAfcuuacgugga | | VPusCfscacGfuAfAfguucAfcCfacuu | | GTAAAGTGGTGAACTTACGT | |
| 1640628 | L96 | | usasc | | GGT | |
| AD- | asasagu(Ghd)guGfAfAfcuuacguggaL | | VPusdCscadCgdTaagudTcAfccacuuu | | GTAAAGTGGTGAACTTACGT | |
| 1640629 | 96 | | sasc | | GGT | |
| AD- | asasgug(Ghd)UfgAfAfCfuuacguggua | | VPusAfsccaCfgUfAfaguuCfaCfcacu | | TAAAGTGGTGAACTTACGTG | |
| 1640630 | L96 | | ususa | | GTG | |
| AD- | asasgug(Ghd)ugAfAfCfuuacgugguaL | | VPusdAsccdAcdGuaagdTuCfaccacuu | | TAAAGTGGTGAACTTACGTG | |
| 1640631 | 96 | | susa | | GTG | |
| AD- | asgsugg(Uhd)GfaAfCfUfuacgugguga | | VPusCfsaccAfcGfUfaaguUfcAfccac | | AAAGTGGTGAACTTACGTGG | |
| 1640632 | L96 | | ususu | | TGA | |
| AD- | asgsugg(Uhd)gaAfCfUfuacguggugaL | | VPusdCsacdCadCguaadGuUfcaccacu | | AAAGTGGTGAACTTACGTGG | |
| 1640633 | 96 | | susu | | TGA | |
| AD- | gsusggu(Ghd)AfaCfUfUfacguggugaa | | VPusUfscadCc(Agn)cguaagUfuCfac | | AAGTGGTGAACTTACGTGGT | |
| 1640634 | L96 | | cacsusu | | GAT | |
| AD- | gsusggu(Ghd)AfaCfUfUfacguggugaa | | VPusUfscacCfaCfGfuaagUfuCfacca | | AAGTGGTGAACTTACGTGGT | |
| 1640635 | L96 | | csusu | | GAT | |
| AD- | gsusggu(Ghd)aaCfUfUfacguggugaaL | | VPusdTscadCcdAcguadAgUfucaccac | | AAGTGGTGAACTTACGTGGT | |
| 1640636 | 96 | | susu | | GAT | |
| AD- | gsusgaa(Chd)UfuAfCfGfuggugauuaa | | VPusUfsaadTc(Agn)ccacguAfaGfuu | | TGGTGAACTTACGTGGTGAT | |
| 1640637 | L96 | | cacscsa | | TAA | |
| AD- | gsasacu(Uhd)AfcGfUfGfgugauuaaua | | VPusAfsuudAa(Tgn)caccacGfuAfag | | GTGAACTTACGTGGTGATTA | |
| 1640638 | L96 | | uucsasc | | ATG | |
| AD- | gsasacu(Uhd)AfcGfUfGfgugauuaaua | | VPusAfsuuaAfuCfAfccacGfuAfaguu | | GTGAACTTACGTGGTGATTA | |
| 1640639 | L96 | | csasc | | ATG | |
| AD- | gsasacu(Uhd)acGfUfGfgugauuaauaL | | VPusdAsuudAadTcaccdAcGfuaaguuc | | GTGAACTTACGTGGTGATTA | |
| 1640640 | 96 | | sasc | | ATG | |
| AD- | asascuu(Ahd)CfgUfGfGfugauuaauga | | VPusCfsauuAfaUfCfaccaCfgUfaagu | | TGAACTTACGTGGTGATTAA | |
| 1640641 | L96 | | uscsa | | TGA | |
| AD- | asascuu(Ahd)cgUfGfGfugauuaaugaL | | VPusdCsaudTadAucacdCaCfguaaguu | | TGAACTTACGTGGTGATTAA | |
| 1640642 | 96 | | scsa | | TGA | |
| AD- | ascsuua(Chd)GfuGfGfUfgauuaaugaa | | VPusUfscauUfaAfUfcaccAfcGfuaag | | GAACTTACGTGGTGATTAAT | |
| 1640643 | L96 | | ususc | | GAA | |
| AD- | ascsuua(Chd)guGfGfUfgauuaaugaaL | | VPusdTscadTudAaucadCcAfcguaagu | | GAACTTACGTGGTGATTAAT | |
| 1640644 | 96 | | susc | | GAA | |
| AD- | csusuac(Ghd)UfgGfUfGfauuaaugaaa | | VPusUfsucdAu(Tgn)aaucacCfaCfgu | | AACTTACGTGGTGATTAATG | |
| 1640645 | L96 | | aagsusu | | AAA | |
| AD- | csusuac(Ghd)UfgGfUfGfauuaaugaaa | | VPusUfsucaUfuAfAfucacCfaCfguaa | | AACTTACGTGGTGATTAATG | |
| 1640646 | L96 | | gsusu | | AAA | |
| AD- | csusuac(Ghd)ugGfUfGfauuaaugaaaL | | VPusdTsucdAudTaaucdAcCfacguaag | | AACTTACGTGGTGATTAATG | |
| 1640647 | 96 | | susu | | AAA | |
| AD- | ususacg(Uhd)GfgUfGfAfuuaaugaaaa | | VPusUfsuudCa(Tgn)uaaucaCfcAfcg | | ACTTACGTGGTGATTAATGA | |
| 1640648 | L96 | | uaasgsu | | AAT | |
| AD- | usascgu(Ghd)GfuGfAfUfuaaugaaaua | | VPusAfsuudTc(Agn)uuaaucAfcCfac | | CTTACGTGGTGATTAATGAA | |
| 1640649 | L96 | | guasasg | | ATT | |
| AD- | usgsgug(Ahd)UfuAfAfUfgaaauuauca | | VPusGfsaudAa(Tgn)uucauuAfaUfca | | CGTGGTGATTAATGAAATTA | |
| 1640650 | L96 | | ccascsg | | TCT | |
| AD- | usgsgug(Ahd)UfuAfAfUfgaaauuauca | | VPusGfsauaAfuUfUfcauuAfaUfcacc | | CGTGGTGATTAATGAAATTA | |
| 1640651 | L96 | | ascsg | | TCT | |
| AD- | usgsgug(Ahd)uuAfAfUfgaaauuaucaL | | VPusdGsaudAadTuucadTuAfaucacca | | CGTGGTGATTAATGAAATTA | |
| 1640652 | 96 | | scsg | | TCT | |
| AD- | asgsuuu(Ghd)GfgCfCfCfgcugcagcua | | VPusAfsgcdTg(C2p)agcgggCfcCfaa | | TGAGTTTGGGCCCGCTGCAG | |
| 1640653 | L96 | | acuscsa | | CTC | |
| AD- | usgsgcg(Ghd)UfaAfCfCfcugcagccua | | VPusAfsggdCu(G2p)caggguUfaCfcg | | GATGGCGGTAACCCTGCAGC | |
| 1640654 | L96 | | ccasusc | | CTG | |
| AD- | csasgag(Ahd)CfaGfAfGfugacccagca | | VPusGfscudGg(G2p)ucacucUfgUfcu | | CGCAGAGACAGAGTGACCCA | |
| 1640655 | L96 | | cugscsg | | GCA | |
| AD- | asgsaga(Chd)AfgAfGfUfgacccagcaa | | VPusUfsgcdTg(G2p)gucacuCfuGfuc | | GCAGAGACAGAGTGACCCAG | |
| 1640656 | L96 | | ucusgsc | | CAA | |
| AD- | gsasgac(Ahd)GfaGfUfGfacccagcaaa | | VPusUfsugdCu(G2p)ggucacUfcUfgu | | CAGAGACAGAGTGACCCAGC | |
| 1640657 | L96 | | cucsusg | | AAC | |
| AD- | gsascag(Ahd)GfuGfAfCfccagcaacca | | VPusGfsgudTg(C2p)ugggucAfcUfcu | | GAGACAGAGTGACCCAGCAA | |
| 1640658 | L96 | | gucsusc | | CCC | |
| AD- | ascsaga(Ghd)UfgAfCfCfcagcaaccca | | VPusGfsggdTu(G2p)cuggguCfaCfuc | | AGACAGAGTGACCCAGCAAC | |
| 1640659 | L96 | | uguscsu | | CCA | |
| AD- | gsasgug(Ahd)CfcCfAfGfcaacccagaa | | VPusUfscudGg(G2p)uugcugGfgUfca | | CAGAGTGACCCAGCAACCCA | |
| 1640660 | L96 | | cucsusg | | GAG | |
| AD- | asgsuga(Chd)CfcAfGfCfaacccagaga | | VPusCfsucdTg(G2p)guugcuGfgGfuc | | AGAGTGACCCAGCAACCCAG | |
| 1640661 | L96 | | acuscsu | | AGC | |
| AD- | asgscaa(Chd)CfcAfGfAfgcccaugaga | | VPusCfsucdAu(G2p)ggcucuGfgGfuu | | CCAGCAACCCAGAGCCCATG | |
| 1640662 | L96 | | gcusgsg | | AGG | |
| AD- | asasccc(Ahd)GfaGfCfCfcaugagggaa | | VPusUfsccdCu(C2p)augggcUfcUfgg | | GCAACCCAGAGCCCATGAGG | |
| 1640663 | L96 | | guusgsc | | GAC | |
| AD- | cscscag(Ahd)GfcCfCfAfugagggacaa | | VPusUfsgudCc(C2p)ucauggGfcUfcu | | AACCCAGAGCCCATGAGGGA | |
| 1640664 | L96 | | gggsusu | | CAC | |
| AD- | cscsaga(Ghd)CfcCfAfUfgagggacaca | | VPusGfsugdTc(C2p)cucaugGfgCfuc | | ACCCAGAGCCCATGAGGGAC | |
| 1640665 | L96 | | uggsgsu | | ACC | |
| AD- | csgscuc(Chd)CfuCfAfCfuugggucuua | | VPusAfsagdAc(C2p)caagugAfgGfga | | CCCGCTCCCTCACTTGGGTC | |
| 1640666 | L96 | | gcgsgsg | | TTC | |
| AD- | gscsucc(Chd)UfcAfCfUfugggucuuca | | VPusGfsaadGa(C2p)ccaaguGfaGfgg | | CCGCTCCCTCACTTGGGTCT | |
| 1640667 | L96 | | agcsgsg | | TCC | |
| AD- | uscsccu(Chd)AfcUfUfGfggucuuccca | | VPusGfsggdAa(G2p)acccaaGfuGfag | | GCTCCCTCACTTGGGTCTTC | |
| 1640668 | L96 | | ggasgsc | | CCT | |
| AD- | uscsacu(Uhd)GfgGfUfCfuucccuugua | | VPusAfscadAg(G2p)gaagacCfcAfag | | CCTCACTTGGGTCTTCCCTT | |
| 1640669 | L96 | | ugasgsg | | GTC | |
| AD- | csascuu(Ghd)GfgUfCfUfucccuuguca | | VPusGfsacdAa(G2p)ggaagaCfcCfaa | | CTCACTTGGGTCTTCCCTTG | |
| 1640670 | L96 | | gugsasg | | TCC | |
| AD- | ususggg(Uhd)CfuUfCfCfcuuguccuca | | VPusGfsagdGa(C2p)aagggaAfgAfcc | | ACTTGGGTCTTCCCTTGTCC | |
| 1640671 | L96 | | caasgsu | | TCT | |
| AD- | gsgsguc(Uhd)UfcCfCfUfuguccucuca | | VPusGfsagdAg(G2p)acaaggGfaAfga | | TTGGGTCTTCCCTTGTCCTC | |
| 1640672 | L96 | | cccsasa | | TCG | |
| AD- | gsgsucu(Uhd)CfcCfUfUfguccucucga | | VPusCfsgadGa(G2p)gacaagGfgAfag | | TGGGTCTTCCCTTGTCCTCT | |
| 1640673 | L96 | | accscsa | | CGC | |
| AD- | cscscuu(Ghd)UfcCfUfCfucgcgaggga | | VPusCfsccdTc(G2p)cgagagGfaCfaa | | TTCCCTTGTCCTCTCGCGAG | |
| 1640674 | L96 | | gggsasa | | GGG | |
| AD- | gscscug(Uhd)CfcUfGfAfauucaccgaa | | VPusUfscgdGu(G2p)aauucaGfgAfca | | GGGCCTGTCCTGAATTCACC | |
| 1640675 | L96 | | ggcscsc | | GAG | |
| AD- | csusguc(Chd)UfgAfAfUfucaccgagga | | VPusCfscudCg(G2p)ugaauuCfaGfga | | GCCTGTCCTGAATTCACCGA | |
| 1640676 | L96 | | cagsgsc | | GGG | |
| AD- | gscsccu(Uhd)CfgCfAfGfgaugcgaaga | | VPusCfsuudCg(C2p)auccugCfgAfag | | TCGCCCTTCGCAGGATGCGA | |
| 1640677 | L96 | | ggcsgsa | | AGA | |
| AD- | cscscuu(Chd)GfcAfGfGfaugcgaagaa | | VPusUfscudTc(G2p)cauccuGfcGfaa | | CGCCCTTCGCAGGATGCGAA | |
| 1640678 | L96 | | gggscsg | | GAG | |
| AD- | cscsuuc(Ghd)CfaGfGfAfugcgaagaga | | VPusCfsucdTu(C2p)gcauccUfgCfga | | GCCCTTCGCAGGATGCGAAG | |
| 1640679 | L96 | | aggsgsc | | AGT | |
| AD- | uscsgca(Ghd)GfaUfGfCfgaagaguuga | | VPusCfsaadCu(C2p)uucgcaUfcCfug | | CTTCGCAGGATGCGAAGAGT | |
| 1640680 | L96 | | cgasasg | | TGG | |
| AD- | usasuuu(Ghd)CfgAfGfAfaaccagggca | | VPusGfsccdCu(G2p)guuucuCfgCfaa | | TTTATTTGCGAGAAACCAGG | |
| 1640681 | L96 | | auasasa | | GCG | |
| AD- | asascug(Chd)GfuUfGfUfgaagagaaca | | VPusGfsuudCu(C2p)uucacaAfcGfca | | TTAACTGCGTTGTGAAGAGA | |
| 1640682 | L96 | | guusasa | | ACT | |
| AD- | csusgcg(Uhd)UfgUfGfAfagagaacuua | | VPusAfsagdTu(C2p)ucuucaCfaAfcg | | AACTGCGTTGTGAAGAGAAC | |
| 1640683 | L96 | | cagsusu | | TTG | |
| AD- | csgsuug(Uhd)GfaAfGfAfgaacuuggaa | | VPusUfsccdAa(G2p)uucucuUfcAfca | | TGCGTTGTGAAGAGAACTTG | |
| 1640684 | L96 | | acgscsa | | GAG | |
| AD- | gsusgaa(Ghd)AfgAfAfCfuuggaggaga | | VPusCfsucdCu(C2p)caaguuCfuCfuu | | TTGTGAAGAGAACTTGGAGG | |
| 1640685 | L96 | | cacsasa | | AGC | |
| AD- | gsasaga(Ghd)AfaCfUfUfggaggagcca | | VPusGfsgcdTc(C2p)uccaagUfuCfuc | | GTGAAGAGAACTTGGAGGAG | |
| 1640686 | L96 | | uucsasc | | CCG | |
| AD- | asasgag(Ahd)AfcUfUfGfgaggagccga | | VPusCfsggdCu(C2p)cuccaaGfuUfcu | | TGAAGAGAACTTGGAGGAGC | |
| 1640687 | L96 | | cuuscsa | | CGA | |
| AD- | gsasgaa(Chd)UfuGfGfAfggagccgaga | | VPusCfsucdGg(C2p)uccuccAfaGfuu | | AAGAGAACTTGGAGGAGCCG | |
| 1640688 | L96 | | cucsusu | | AGA | |
| AD- | asgsaac(Uhd)UfgGfAfGfgagccgagaa | | VPusUfscudCg(G2p)cuccucCfaAfgu | | AGAGAACTTGGAGGAGCCGA | |
| 1640689 | L96 | | ucuscsu | | GAT | |
| AD- | gsasacu(Uhd)GfgAfGfGfagccgagaua | | VPusAfsucdTc(G2p)gcuccuCfcAfag | | GAGAACTTGGAGGAGCCGAG | |
| 1640690 | L96 | | uucsusc | | ATT | |
| AD- | asascuu(Ghd)GfaGfGfAfgccgagauua | | VPusAfsaudCu(C2p)ggcuccUfcCfaa | | AGAACTTGGAGGAGCCGAGA | |
| 1640691 | L96 | | guuscsu | | TTT | |
| AD- | asgsgag(Chd)CfgAfGfAfuuugcucaga | | VPusCfsugdAg(C2p)aaaucuCfgGfcu | | GGAGGAGCCGAGATTTGCTC | |
| 1640692 | L96 | | ccuscsc | | AGT | |
| AD- | gsgsagc(Chd)GfaGfAfUfuugcucagua | | VPusAfscudGa(G2p)caaaucUfcGfgc | | GAGGAGCCGAGATTTGCTCA | |
| 1640693 | L96 | | uccsusc | | GTG | |
| AD- | asgsccg(Ahd)GfaUfUfUfgcucagugca | | VPusGfscadCu(G2p)agcaaaUfcUfcg | | GGAGCCGAGATTTGCTCAGT | |
| 1640694 | L96 | | gcuscsc | | GCC | |
| AD- | cscsgag(Ahd)UfuUfGfCfucagugccaa | | VPusUfsggdCa(C2p)ugagcaAfaUfcu | | AGCCGAGATTTGCTCAGTGC | |
| 1640695 | L96 | | cggscsu | | CAC | |
| AD- | gsasgau(Uhd)UfgCfUfCfagugccacua | | VPusAfsgudGg(C2p)acugagCfaAfau | | CCGAGATTTGCTCAGTGCCA | |
| 1640696 | L96 | | cucsgsg | | CTT | |
| AD- | asgsauu(Uhd)GfcUfCfAfgugccacuua | | VPusAfsagdTg(G2p)cacugaGfcAfaa | | CGAGATTTGCTCAGTGCCAC | |
| 1640697 | L96 | | ucuscsg | | TTC | |
| AD- | gsasuuu(Ghd)CfuCfAfGfugccacuuca | | VPusGfsaadGu(G2p)gcacugAfgCfaa | | GAGATTTGCTCAGTGCCACT | |
| 1640698 | L96 | | aucsusc | | TCC | |
| AD- | ususugc(Uhd)CfaGfUfGfccacuuccca | | VPusGfsggdAa(G2p)uggcacUfgAfgc | | GATTTGCTCAGTGCCACTTC | |
| 1640699 | L96 | | aaasusc | | CCT | |
| AD- | gscsuca(Ghd)UfgCfCfAfcuucccucua | | VPusAfsgadGg(G2p)aaguggCfaCfug | | TTGCTCAGTGCCACTTCCCT | |
| 1640700 | L96 | | agcsasa | | CTT | |
| AD- | csuscag(Uhd)GfcCfAfCfuucccucuua | | VPusAfsagdAg(G2p)gaagugGfcAfcu | | TGCTCAGTGCCACTTCCCTC | |
| 1640701 | L96 | | gagscsa | | TTC | |
| AD- | asgsugc(Chd)AfcUfUfCfccucuucuaa | | VPusUfsagdAa(G2p)agggaaGfuGfgc | | TCAGTGCCACTTCCCTCTTC | |
| 1640702 | L96 | | acusgsa | | TAG | |
| AD- | gscscac(Uhd)UfcCfCfUfcuucuaguca | | VPusGfsacdTa(G2p)aagaggGfaAfgu | | GTGCCACTTCCCTCTTCTAG | |
| 1640703 | L96 | | ggcsasc | | TCT | |
| AD- | ascsuuc(Chd)CfuCfUfUfcuagucugaa | | VPusUfscadGa(C2p)uagaagAfgGfga | | CCACTTCCCTCTTCTAGTCT | |
| 1640704 | L96 | | agusgsg | | GAG | |
| AD- | ususccc(Uhd)CfuUfCfUfagucugagaa | | VPusUfscudCa(G2p)acuagaAfgAfgg | | ACTTCCCTCTTCTAGTCTGA | |
| 1640705 | L96 | | gaasgsu | | GAG | |
| AD- | cscscuc(Uhd)UfcUfAfGfucugagagga | | VPusCfscudCu(C2p)agacuaGfaAfga | | TTCCCTCTTCTAGTCTGAGA | |
| 1640706 | L96 | | gggsasa | | GGG | |
| AD- | csuscuu(Chd)UfaGfUfCfugagagggaa | | VPusUfsccdCu(C2p)ucagacUfaGfaa | | CCCTCTTCTAGTCTGAGAGG | |
| 1640707 | L96 | | gagsgsg | | GAA | |
| AD- | csusucu(Ahd)GfuCfUfGfagagggaaga | | VPusCfsuudCc(C2p)ucucagAfcUfag | | CTCTTCTAGTCTGAGAGGGA | |
| 1640708 | L96 | | aagsasg | | AGA | |
| AD- | ususcua(Ghd)UfcUfGfAfgagggaagaa | | VPusUfscudTc(C2p)cucucaGfaCfua | | TCTTCTAGTCTGAGAGGGAA | |
| 1640709 | L96 | | gaasgsa | | GAG | |
| AD- | asgsucu(Ghd)AfgAfGfGfgaagagggca | | VPusGfsccdCu(C2p)uucccuCfuCfag | | CTAGTCTGAGAGGGAAGAGG | |
| 1640711 | L96 | | acusasg | | GCT | |
| AD- | uscsuga(Ghd)AfgGfGfAfagagggcuga | | VPusCfsagdCc(C2p)ucuuccCfuCfuc | | AGTCTGAGAGGGAAGAGGGC | |
| 1640712 | L96 | | agascsu | | TGG | |
| AD- | csusgag(Ahd)GfgGfAfAfgagggcugga | | VPusCfscadGc(C2p)cucuucCfcUfcu | | GTCTGAGAGGGAAGAGGGCT | |
| 1640713 | L96 | | cagsasc | | GGG | |
| AD- | ususugg(Ahd)GfcUfGfGfagagauguga | | VPusCfsacdAu(C2p)ucuccaGfcUfcc | | GGTTTGGAGCTGGAGAGATG | |
| 1640714 | L96 | | aaascsc | | TGG | |
| AD- | usasgga(Chd)GfcCfUfCfggcgggagua | | VPusAfscudCc(C2p)gccgagGfcGfuc | | TTTAGGACGCCTCGGCGGGA | |
| 1640715 | L96 | | cuasasa | | GTG | |
| AD- | asgsggc(Ghd)CfgUfCfCfaaugggagaa | | VPusUfscudCc(C2p)auuggaCfgCfgc | | TGAGGGCGCGTCCAATGGGA | |
| 1640716 | L96 | | ccuscsa | | GAT | |
| AD- | gsgsgcg(Chd)GfuCfCfAfaugggagaua | | VPusAfsucdTc(C2p)cauuggAfcGfcg | | GAGGGCGCGTCCAATGGGAG | |
| 1640717 | L96 | | cccsusc | | ATT | |
| AD- | gsgscgc(Ghd)UfcCfAfAfugggagauua | | VPusAfsaudCu(C2p)ccauugGfaCfgc | | AGGGCGCGTCCAATGGGAGA | |
| 1640718 | L96 | | gccscsu | | TTT | |
| AD- | csgscgu(Chd)CfaAfUfGfggagauuuca | | VPusGfsaadAu(C2p)ucccauUfgGfac | | GGCGCGTCCAATGGGAGATT | |
| 1640719 | L96 | | gcgscsc | | TCT | |
| AD- | ascsagc(Chd)UfgAfGfAfuuugaggcua | | VPusAfsgcdCu(C2p)aaaucuCfaGfgc | | AAACAGCCTGAGATTTGAGG | |
| 1640720 | L96 | | ugususu | | CTC | |
| AD- | asgsccu(Ghd)AfgAfUfUfugaggcucua | | VPusAfsgadGc(C2p)ucaaauCfuCfag | | ACAGCCTGAGATTTGAGGCT | |
| 1640721 | L96 | | gcusgsu | | CTT | |
| AD- | gscscug(Ahd)GfaUfUfUfgaggcucuua | | VPusAfsagdAg(C2p)cucaaaUfcUfca | | CAGCCTGAGATTTGAGGCTC | |
| 1640722 | L96 | | ggcsusg | | TTC | |
| AD- | cscsuga(Ghd)AfuUfUfGfaggcucuuca | | VPusGfsaadGa(G2p)ccucaaAfuCfuc | | AGCCTGAGATTTGAGGCTCT | |
| 1640723 | L96 | | aggscsu | | TCC | |
| AD- | usgsaga(Uhd)UfuGfAfGfgcucuuccua | | VPusAfsggdAa(G2p)agccucAfaAfuc | | CCTGAGATTTGAGGCTCTTC | |
| 1640724 | L96 | | ucasgsg | | CTA | |
| AD- | gsasuuu(Ghd)AfgGfCfUfcuuccuacaa | | VPusUfsgudAg(G2p)aagagcCfuCfaa | | GAGATTTGAGGCTCTTCCTA | |
| 1640725 | L96 | | aucsusc | | CAT | |
| AD- | asusuug(Ahd)GfgCfUfCfuuccuacaua | | VPusAfsugdTa(G2p)gaagagCfcUfca | | AGATTTGAGGCTCTTCCTAC | |
| 1640726 | L96 | | aauscsu | | ATT | |
| AD- | usgsagg(Chd)UfcUfUfCfcuacauugua | | VPusAfscadAu(G2p)uaggaaGfaGfcc | | TTTGAGGCTCTTCCTACATT | |
| 1640727 | L96 | | ucasasa | | GTC | |
| AD- | gscsucu(Uhd)CfcUfAfCfauugucagga | | VPusCfscudGa(C2p)aauguaGfgAfag | | AGGCTCTTCCTACATTGTCA | |
| 1640728 | L96 | | agcscsu | | GGA | |
| AD- | uscsuuc(Chd)UfaCfAfUfugucaggaca | | VPusGfsucdCu(G2p)acaaugUfaGfga | | GCTCTTCCTACATTGTCAGG | |
| 1640729 | L96 | | agasgsc | | ACA | |
| AD- | ususccu(Ahd)CfaUfUfGfucaggacaua | | VPusAfsugdTc(C2p)ugacaaUfgUfag | | TCTTCCTACATTGTCAGGAC | |
| 1640730 | L96 | | gaasgsa | | ATT | |
| AD- | uscscua(Chd)AfuUfGfUfcaggacauua | | VPusAfsaudGu(C2p)cugacaAfuGfua | | CTTCCTACATTGTCAGGACA | |
| 1640731 | L96 | | ggasasg | | TTT | |
| AD- | csusaca(Uhd)UfgUfCfAfggacauuuca | | VPusGfsaadAu(G2p)uccugaCfaAfug | | TCCTACATTGTCAGGACATT | |
| 1640732 | L96 | | uagsgsa | | TCA | |
| AD- | ususguc(Ahd)GfgAfCfAfuuucauuuaa | | VPusUfsaadAu(G2p)aaauguCfcUfga | | CATTGTCAGGACATTTCATT | |
| 1640733 | L96 | | caasusg | | TAG | |
| AD- | gsgsaca(Uhd)UfuCfAfUfuuaguucaua | | VPusAfsugdAa(C2p)uaaaugAfaAfug | | CAGGACATTTCATTTAGTTC | |
| 1640734 | L96 | | uccsusg | | ATG | |
| AD- | ususcau(Uhd)UfaGfUfUfcaugaucaca | | VPusGfsugdAu(C2p)augaacUfaAfau | | ATTTCATTTAGTTCATGATC | |
| 1640735 | L96 | | gaasasu | | ACG | |
| AD- | asgsuuc(Ahd)UfgAfUfCfacggugguaa | | VPusUfsacdCa(C2p)cgugauCfaUfga | | TTAGTTCATGATCACGGTGG | |
| 1640736 | L96 | | acusasa | | TAG | |
| AD- | ususcau(Ghd)AfuCfAfCfggugguagua | | VPusAfscudAc(C2p)accgugAfuCfau | | AGTTCATGATCACGGTGGTA | |
| 1640737 | L96 | | gaascsu | | GTA | |
| AD- | uscsaug(Ahd)UfcAfCfGfgugguaguaa | | VPusUfsacdTa(C2p)caccguGfaUfca | | GTTCATGATCACGGTGGTAG | |
| 1640738 | L96 | | ugasasc | | TAA | |
| AD- | usgsauc(Ahd)CfgGfUfGfguaguaacaa | | VPusUfsgudTa(C2p)uaccacCfgUfga | | CATGATCACGGTGGTAGTAA | |
| 1640739 | L96 | | ucasusg | | CAC | |
| AD- | csascgg(Uhd)GfgUfAfGfuaacacgaua | | VPusAfsucdGu(G2p)uuacuaCfcAfcc | | ATCACGGTGGTAGTAACACG | |
| 1640740 | L96 | | gugsasu | | ATT | |
| AD- | usasagc(Ahd)CfcAfCfCfuaagagauca | | VPusGfsaudCu(C2p)uuagguGfgUfgc | | TTTAAGCACCACCTAAGAGA | |
| 1640741 | L96 | | uuasasa | | TCT | |
| AD- | ascscac(Chd)UfaAfGfAfgaucugcuca | | VPusGfsagdCa(G2p)aucucuUfaGfgu | | GCACCACCTAAGAGATCTGC | |
| 1640742 | L96 | | ggusgsc | | TCA | |
| AD- | csasccu(Ahd)AfgAfGfAfucugcucaua | | VPusAfsugdAg(C2p)agaucuCfuUfag | | ACCACCTAAGAGATCTGCTC | |
| 1640743 | L96 | | gugsgsu | | ATC | |
| AD- | ascscua(Ahd)GfaGfAfUfcugcucauca | | VPusGfsaudGa(G2p)cagaucUfcUfua | | CCACCTAAGAGATCTGCTCA | |
| 1640744 | L96 | | ggusgsg | | TCT | |
| AD- | csusaag(Ahd)GfaUfCfUfgcucaucuaa | | VPusUfsagdAu(G2p)agcagaUfcUfcu | | ACCTAAGAGATCTGCTCATC | |
| 1640745 | L96 | | uagsgsu | | TAA | |
| AD- | asgsaga(Uhd)CfuGfCfUfcaucuaagca | | VPusGfscudTa(G2p)augagcAfgAfuc | | TAAGAGATCTGCTCATCTAA | |
| 1640746 | L96 | | ucususa | | GCC | |
| AD- | asuscug(Chd)UfcAfUfCfuaagccuaaa | | VPusUfsuadGg(C2p)uuagauGfaGfca | | AGATCTGCTCATCTAAGCCT | |
| 1640747 | L96 | | gauscsu | | AAG | |
| AD- | csusgcu(Chd)AfuCfUfAfagccuaagua | | VPusAfscudTa(G2p)gcuuagAfuGfag | | ATCTGCTCATCTAAGCCTAA | |
| 1640748 | L96 | | cagsasu | | GTT | |
| AD- | uscsuaa(Ghd)CfcUfAfAfguuggucuga | | VPusCfsagdAc(C2p)aacuuaGfgCfuu | | CATCTAAGCCTAAGTTGGTC | |
| 1640749 | L96 | | agasusg | | TGC | |
| AD- | csusaag(Chd)CfuAfAfGfuuggucugca | | VPusGfscadGa(C2p)caacuuAfgGfcu | | ATCTAAGCCTAAGTTGGTCT | |
| 1640750 | L96 | | uagsasu | | GCA | |
| AD- | asasgcc(Uhd)AfaGfUfUfggucugcaga | | VPusCfsugdCa(G2p)accaacUfuAfgg | | CTAAGCCTAAGTTGGTCTGC | |
| 1640751 | L96 | | cuusasg | | AGG | |
| AD- | gscscua(Ahd)GfuUfGfGfucugcaggca | | VPusGfsccdTg(C2p)agaccaAfcUfua | | AAGCCTAAGTTGGTCTGCAG | |
| 1640752 | L96 | | ggcsusu | | GCG | |
| AD- | cscsuaa(Ghd)UfuGfGfUfcugcaggcga | | VPusCfsgcdCu(G2p)cagaccAfaCfuu | | AGCCTAAGTTGGTCTGCAGG | |
| 1640753 | L96 | | aggscsu | | CGT | |
| AD- | usasagu(Uhd)GfgUfCfUfgcaggcguua | | VPusAfsacdGc(C2p)ugcagaCfcAfac | | CCTAAGTTGGTCTGCAGGCG | |
| 1640754 | L96 | | uuasgsg | | TTT | |
| AD- | gsuscug(Chd)AfgGfCfGfuuugaaugaa | | VPusUfscadTu(C2p)aaacgcCfuGfca | | TGGTCTGCAGGCGTTTGAAT | |
| 1640755 | L96 | | gacscsa | | GAG | |
| AD- | gscsagg(Chd)GfuUfUfGfaaugaguuga | | VPusCfsaadCu(C2p)auucaaAfcGfcc | | CTGCAGGCGTTTGAATGAGT | |
| 1640756 | L96 | | ugcsasg | | TGT | |
| AD- | ususuga(Ahd)UfgAfGfUfugugguugca | | VPusGfscadAc(C2p)acaacuCfaUfuc | | CGTTTGAATGAGTTGTGGTT | |
| 1640757 | L96 | | aaascsg | | GCC | |
| AD- | ususgaa(Uhd)GfaGfUfUfgugguugcca | | VPusGfsgcdAa(C2p)cacaacUfcAfuu | | GTTTGAATGAGTTGTGGTTG | |
| 1640758 | L96 | | caasasc | | CCA | |
| AD- | asasuga(Ghd)UfuGfUfGfguugccaaga | | VPusCfsuudGg(C2p)aaccacAfaCfuc | | TGAATGAGTTGTGGTTGCCA | |
| 1640759 | L96 | | auuscsa | | AGT | |
| AD- | asusgag(Uhd)UfgUfGfGfuugccaagua | | VPusAfscudTg(G2p)caaccaCfaAfcu | | GAATGAGTTGTGGTTGCCAA | |
| 1640760 | L96 | | caususc | | GTA | |
| AD- | usgsagu(Uhd)GfuGfGfUfugccaaguaa | | VPusUfsacdTu(G2p)gcaaccAfcAfac | | AATGAGTTGTGGTTGCCAAG | |
| 1640761 | L96 | | ucasusu | | TAA | |
| AD- | ususgcc(Ahd)AfgUfAfAfaguggugaaa | | VPusUfsucdAc(C2p)acuuuaCfuUfgg | | GGTTGCCAAGTAAAGTGGTG | |
| 1640762 | L96 | | caascsc | | AAC | |
| AD- | usgscca(Ahd)GfuAfAfAfguggugaaca | | VPusGfsuudCa(C2p)cacuuuAfcUfug | | GTTGCCAAGTAAAGTGGTGA | |
| 1640763 | L96 | | gcasasc | | ACT | |
| AD- | cscsaag(Uhd)AfaAfGfUfggugaacuua | | VPusAfsagdTu(C2p)accacuUfuAfcu | | TGCCAAGTAAAGTGGTGAAC | |
| 1640764 | L96 | | uggscsa | | TTA | |
| AD- | asgsuaa(Ahd)GfuGfGfUfgaacuuacga | | VPusCfsgudAa(G2p)uucaccAfcUfuu | | CAAGTAAAGTGGTGAACTTA | |
| 1640765 | L96 | | acususg | | CGT | |
| AD- | usgsgug(Ahd)AfcUfUfAfcguggugaua | | VPusAfsucdAc(C2p)acguaaGfuUfca | | AGTGGTGAACTTACGTGGTG | |
| 1640766 | L96 | | ccascsu | | ATT | |
| AD- | usgsaac(Uhd)UfaCfGfUfggugauuaaa | | VPusUfsuadAu(C2p)accacgUfaAfgu | | GGTGAACTTACGTGGTGATT | |
| 1640767 | L96 | | ucascsc | | AAT | |
| AD- | ascsgug(Ghd)UfgAfUfUfaaugaaauua | | VPusAfsaudTu(C2p)auuaauCfaCfca | | TTACGTGGTGATTAATGAAA | |
| 1640768 | L96 | | cgusasa | | TTA | |

TABLE 4
Results of Dual-Luciferase Assays

| | Position in | | | | |
|---|---|---|---|---|---|
| | Dual-Luc | | | % Avg | |
| | Vector | % Message | | Message | |
| | (HTT_ex_plus_{—} | Remaining- | | Remaining- | |
| Duplex ID | int_1_full) | 50 nM | std dev. | 10 nM | std dev. |
| AD-1640653.1 | 367 | 88 | 10 | 101 | 2 |
| AD-1640654.1 | 421 | 49 | 11 | 58 | 2 |
| AD-1640313.1 | 422 | 73 | 10 | 77 | 12 |
| AD-1640314.1 | 470 | 42 | 3 | 44 | 10 |
| AD-1640655.1 | 471 | 72 | 18 | 69 | 0 |
| AD-1640656.1 | 472 | 43 | 9 | 51 | 0 |
| AD-1640657.1 | 473 | 28 | 9 | 38 | 5 |
| AD-1640315.1 | 474 | 52 | 8 | 60 | 8 |
| AD-1640658.1 | 475 | 81 | 13 | 79 | 9 |
| AD-1640659.1 | 476 | 54 | 9 | 68 | 6 |
| AD-1640316.1 | 477 | 48 | 12 | 49 | 8 |
| AD-1640317.1 | 478 | 92 | 19 | 82 | 8 |
| AD-1640660.1 | 479 | 74 | 9 | 63 | 3 |
| AD-1640661.1 | 480 | 36 | 5 | 46 | 1 |
| AD-1640662.1 | 488 | 66 | 11 | 67 | 2 |
| AD-1640319.1 | 488 | 82 | 15 | 72 | 2 |
| AD-1640318.1 | 488 | 91 | 10 | 95 | 1 |
| AD-1640321.1 | 489 | 69 | 10 | 76 | 0 |
| AD-1640320.1 | 489 | 86 | 20 | 85 | 7 |
| AD-1640324.1 | 490 | 65 | 8 | 70 | 5 |
| AD-1640322.1 | 490 | 68 | 11 | 83 | 3 |
| AD-1640323.1 | 490 | 82 | 12 | 87 | 6 |
| AD-1640663.1 | 491 | 59 | 12 | 71 | 1 |
| AD-1640325.1 | 492 | 61 | 6 | 56 | 15 |
| AD-1640664.1 | 493 | 58 | 10 | 67 | 1 |
| AD-1640665.1 | 494 | 77 | 6 | 75 | 3 |
| AD-1640327.1 | 554 | 71 | 9 | 68 | 6 |
| AD-1640326.1 | 554 | 62 | 7 | 72 | 4 |
| AD-1640666.1 | 554 | 77 | 12 | 74 | 4 |
| AD-1640667.1 | 555 | 47 | 4 | 53 | 0 |
| AD-1640328.1 | 556 | 94 | 10 | 96 | 10 |
| AD-1640668.1 | 557 | 80 | 12 | 96 | 3 |
| AD-1640329.1 | 558 | 83 | 6 | 91 | 8 |
| AD-1640330.1 | 559 | 52 | 4 | 59 | 6 |
| AD-1640331.1 | 559 | 71 | 18 | 69 | 4 |
| AD-1640332.1 | 559 | 71 | 11 | 70 | 15 |
| AD-1640669.1 | 561 | 23 | 2 | 32 | 5 |
| AD-1640333.1 | 562 | 35 | 8 | 32 | 0 |
| AD-1640334.1 | 562 | 39 | 6 | 36 | 5 |
| AD-1640670.1 | 562 | 40 | 5 | 42 | 1 |
| AD-1640337.1 | 563 | 37 | 7 | 41 | 3 |
| AD-1640336.1 | 563 | 51 | 7 | 52 | 4 |
| AD-1640335.1 | 563 | 80 | 20 | 95 | 18 |
| AD-1640339.1 | 564 | 65 | 22 | 65 | 4 |
| AD-1640338.1 | 564 | 79 | 13 | 82 | 11 |
| AD-1640671.1 | 565 | 70 | 8 | 74 | 2 |
| AD-1640340.1 | 566 | 62 | 5 | 66 | 1 |
| AD-1640672.1 | 567 | 75 | 17 | 80 | 3 |
| AD-1640673.1 | 568 | 90 | 9 | 97 | 4 |
| AD-1640341.1 | 569 | 47 | 8 | 53 | 4 |
| AD-1640343.1 | 570 | 52 | 2 | 49 | 7 |
| AD-1640342.1 | 570 | 55 | 11 | 57 | 5 |
| AD-1640345.1 | 571 | 80 | 14 | 67 | 7 |
| AD-1640344.1 | 571 | 73 | 12 | 69 | 3 |
| AD-1640346.1 | 572 | 55 | 7 | 54 | 7 |
| AD-1640347.1 | 572 | 60 | 6 | 59 | 3 |
| AD-1640349.1 | 573 | 56 | 12 | 64 | 4 |
| AD-1640348.1 | 573 | 56 | 7 | 66 | 1 |
| AD-1640351.1 | 574 | 49 | 15 | 62 | 7 |
| AD-1640674.1 | 574 | 65 | 18 | 81 | 2 |
| AD-1640350.1 | 574 | 62 | 16 | 83 | 1 |
| AD-1640675.1 | 613 | 31 | 6 | 53 | 1 |
| AD-1640352.1 | 614 | 38 | 3 | 45 | 4 |
| AD-1640353.1 | 614 | 44 | 6 | 46 | 3 |
| AD-1640355.1 | 615 | 47 | 9 | 45 | 3 |
| AD-1640354.1 | 615 | 46 | 2 | 49 | 2 |
| AD-1640676.1 | 615 | 41 | 7 | 54 | 4 |
| AD-1640357.1 | 616 | 41 | 2 | 43 | 3 |
| AD-1640356.1 | 616 | 53 | 6 | 72 | 14 |
| AD-1640358.1 | 656 | 69 | 12 | 85 | 6 |
| AD-1640359.1 | 657 | 86 | 4 | 92 | 5 |
| AD-1640361.1 | 658 | 79 | 12 | 76 | 5 |
| AD-1640360.1 | 658 | 82 | 6 | 84 | 2 |
| AD-1640677.1 | 658 | 98 | 11 | 107 | 5 |
| AD-1640678.1 | 659 | 62 | 5 | 82 | 14 |
| AD-1640363.1 | 660 | 46 | 13 | 50 | 6 |
| AD-1640362.1 | 660 | 65 | 13 | 64 | 3 |
| AD-1640679.2 | 660 | 74 | 9 | 88 | 35 |
| AD-1640364.1 | 661 | 62 | 9 | 71 | 6 |
| AD-1640365.1 | 662 | 66 | 13 | 77 | 12 |
| AD-1640367.1 | 663 | 26 | 4 | 42 | 1 |
| AD-1640366.1 | 663 | 47 | 9 | 46 | 2 |
| AD-1640680.2 | 663 | 46 | 6 | 46 | 18 |
| AD-1640368.1 | 664 | 37 | 7 | 48 | 2 |
| AD-1640369.1 | 664 | 56 | 13 | 58 | 5 |
| AD-1640370.1 | 665 | 57 | 11 | 54 | 5 |
| AD-1640371.1 | 665 | 46 | 7 | 56 | 10 |
| AD-1640681.2 | 704 | 65 | 20 | 65 | 26 |
| AD-1640372.1 | 705 | 19 | 2 | 28 | 4 |
| AD-1640374.1 | 705 | 31 | 4 | 34 | 1 |
| AD-1640373.1 | 705 | 33 | 4 | 38 | 4 |
| AD-1640376.1 | 706 | 46 | 7 | 58 | 6 |
| AD-1640375.1 | 706 | 61 | 21 | 63 | 4 |
| AD-1640378.1 | 707 | 30 | 4 | 45 | 6 |
| AD-1640377.1 | 707 | 52 | 16 | 73 | 8 |
| AD-1640379.1 | 735 | 22 | 4 | 31 | 8 |
| AD-1640682.2 | 736 | 41 | 5 | 33 | 16 |
| AD-1640380.1 | 737 | 38 | 8 | 42 | 6 |
| AD-1640683.2 | 738 | 32 | 7 | 25 | 12 |
| AD-1640383.1 | 739 | 14 | 2 | 14 | 3 |
| AD-1640382.1 | 739 | 11 | 2 | 16 | 3 |
| AD-1640381.1 | 739 | 18 | 2 | 22 | 6 |
| AD-1640384.1 | 740 | 14 | 2 | 17 | 3 |
| AD-1640385.1 | 740 | 18 | 4 | 20 | 8 |
| AD-1640684.2 | 741 | 36 | 4 | 33 | 15 |
| AD-1640386.1 | 742 | 21 | 2 | 24 | 2 |
| AD-1640387.1 | 742 | 19 | 2 | 27 | 7 |
| AD-1640389.1 | 745 | 20 | 4 | 25 | 4 |
| AD-1640685.2 | 745 | 27 | 4 | 28 | 11 |
| AD-1640388.1 | 745 | 19 | 3 | 29 | 4 |
| AD-1640390.1 | 746 | 19 | 1 | 25 | 7 |
| AD-1640686.2 | 747 | 38 | 8 | 44 | 17 |
| AD-1640687.2 | 748 | 67 | 25 | 58 | 19 |
| AD-1640391.1 | 749 | 12 | 2 | 20 | 3 |
| AD-1640393.1 | 750 | 29 | 7 | 48 | 13 |
| AD-1640392.1 | 750 | 36 | 3 | 51 | 9 |
| AD-1640688.2 | 750 | 85 | 18 | 73 | 28 |
| AD-1640689.2 | 751 | 65 | 11 | 47 | 15 |
| AD-1640690.2 | 752 | 30 | 3 | 36 | 16 |
| AD-1640691.2 | 753 | 51 | 8 | 50 | 18 |
| AD-1640395.1 | 755 | 26 | 6 | 31 | 7 |
| AD-1640394.1 | 755 | 27 | 5 | 40 | 8 |
| AD-1640397.1 | 756 | 22 | 3 | 26 | 3 |
| AD-1640396.1 | 756 | 34 | 4 | 50 | 4 |
| AD-1640399.1 | 757 | 35 | 3 | 43 | 12 |
| AD-1640398.1 | 757 | 46 | 3 | 62 | 19 |
| AD-1640402.1 | 758 | 42 | 9 | 50 | 12 |
| AD-1640400.1 | 758 | 45 | 7 | 56 | 12 |
| AD-1640401.1 | 758 | 50 | 18 | 57 | 20 |
| AD-1640403.1 | 759 | 89 | 11 | 85 | 5 |
| AD-1640692.2 | 760 | 52 | 4 | 56 | 23 |
| AD-1640693.2 | 761 | 48 | 5 | 49 | 16 |
| AD-1640404.1 | 762 | 32 | 2 | 42 | 3 |
| AD-1640694.2 | 763 | 39 | 7 | 40 | 19 |
| AD-1640405.1 | 764 | 32 | 7 | 34 | 2 |
| AD-1640695.2 | 765 | 55 | 11 | 63 | 29 |
| AD-1640406.1 | 766 | 37 | 8 | 46 | 9 |
| AD-1640696.2 | 767 | 46 | 9 | 40 | 13 |
| AD-1640697.2 | 768 | 39 | 7 | 37 | 15 |
| AD-1640698.2 | 769 | 46 | 2 | 36 | 14 |
| AD-1640407.1 | 770 | 77 | 14 | 85 | 4 |
| AD-1640699.2 | 771 | 109 | 7 | 94 | 35 |
| AD-1640410.1 | 772 | 44 | 4 | 66 | 8 |
| AD-1640409.1 | 772 | 56 | 15 | 67 | 7 |
| AD-1640408.1 | 772 | 87 | 13 | 102 | 6 |
| AD-1640412.1 | 773 | 63 | 5 | 75 | 6 |
| AD-1640413.1 | 773 | 64 | 8 | 79 | 6 |
| AD-1640411.1 | 773 | 91 | 16 | 98 | 8 |
| AD-1640700.2 | 774 | 131 | 11 | 102 | 38 |
| AD-1640701.2 | 775 | 105 | 10 | 81 | 21 |
| AD-1640414.1 | 778 | 78 | 11 | 92 | 4 |
| AD-1640415.1 | 778 | 83 | 18 | 97 | 7 |
| AD-1640702.2 | 778 | 143 | 23 | 134 | 50 |
| AD-1640417.1 | 781 | 82 | 23 | 71 | 3 |
| AD-1640416.1 | 781 | 81 | 11 | 75 | 1 |
| AD-1640703.2 | 781 | 100 | 7 | 79 | 30 |
| AD-1640420.1 | 782 | 45 | 5 | 52 | 3 |
| AD-1640419.1 | 782 | 46 | 9 | 56 | 2 |
| AD-1640418.1 | 782 | 77 | 8 | 85 | 7 |
| AD-1640421.1 | 783 | 62 | 10 | 74 | 3 |
| AD-1640422.1 | 783 | 64 | 10 | 74 | 6 |
| AD-1640429.1 | 783 | 52 | 6 | 76 | 4 |
| AD-1640430.1 | 784 | 38 | 10 | 50 | 5 |
| AD-1640704.2 | 784 | 95 | 7 | 74 | 33 |
| AD-1640433.1 | 785 | 38 | 3 | 53 | 3 |
| AD-1640432.1 | 785 | 44 | 7 | 58 | 1 |
| AD-1640431.1 | 785 | 78 | 5 | 71 | 2 |
| AD-1640705.2 | 786 | 76 | 5 | 71 | 26 |
| AD-1640434.1 | 787 | 93 | 16 | 87 | 4 |
| AD-1640706.2 | 788 | 159 | 13 | 120 | 38 |
| AD-1640435.1 | 789 | 85 | 8 | 86 | 10 |
| AD-1640437.1 | 789 | 75 | 11 | 88 | 4 |
| AD-1640436.1 | 789 | 75 | 18 | 89 | 10 |
| AD-1640707.2 | 790 | 104 | 27 | 99 | 47 |
| AD-1640438.1 | 791 | 48 | 12 | 58 | 7 |
| AD-1640440.1 | 792 | 74 | 22 | 71 | 2 |
| AD-1640439.1 | 792 | 77 | 19 | 82 | 7 |
| AD-1640708.2 | 792 | 102 | 21 | 82 | 21 |
| AD-1640709.2 | 793 | 107 | 13 | 112 | 38 |
| AD-1640442.1 | 794 | 44 | 6 | 64 | 2 |
| AD-1640710.1 | 794 | 95 | 18 | 90 | 25 |
| AD-1640441.1 | 794 | 81 | 11 | 90 | 7 |
| AD-1640444.1 | 795 | 46 | 6 | 68 | 5 |
| AD-1640443.1 | 795 | 68 | 6 | 87 | 12 |
| AD-1640445.1 | 795 | 90 | 21 | 92 | 11 |
| AD-1640446.1 | 796 | 94 | 13 | 97 | 6 |
| AD-1640447.1 | 796 | 93 | 7 | 108 | 4 |
| AD-1640711.2 | 797 | 84 | 11 | 75 | 29 |
| AD-1640448.1 | 798 | 69 | 9 | 80 | 3 |
| AD-1640449.1 | 799 | 68 | 9 | 80 | 9 |
| AD-1640450.1 | 799 | 75 | 8 | 83 | 10 |
| AD-1640712.2 | 799 | 115 | 9 | 103 | 29 |
| AD-1640452.1 | 800 | 72 | 6 | 79 | 7 |
| AD-1640451.1 | 800 | 78 | 8 | 90 | 12 |
| AD-1640713.2 | 800 | 118 | 13 | 106 | 31 |
| AD-1640454.1 | 850 | 27 | 3 | 32 | 2 |
| AD-1640453.1 | 850 | 28 | 6 | 34 | 3 |
| AD-1640714.2 | 850 | 40 | 5 | 40 | 15 |
| AD-1640456.1 | 851 | 16 | 1 | 25 | 5 |
| AD-1640455.1 | 851 | 35 | 7 | 38 | 8 |
| AD-1640458.1 | 873 | 13 | 2 | 15 | 5 |
| AD-1640457.1 | 873 | 17 | 2 | 17 | 5 |
| AD-1640461.1 | 874 | 13 | 1 | 19 | 6 |
| AD-1640459.1 | 874 | 22 | 2 | 30 | 7 |
| AD-1640460.1 | 874 | 34 | 14 | 34 | 4 |
| AD-1640715.2 | 895 | 107 | 14 | 87 | 22 |
| AD-1640462.1 | 895 | 83 | 14 | 95 | 5 |
| AD-1640464.1 | 940 | 30 | 3 | 39 | 4 |
| AD-1640463.1 | 940 | 55 | 10 | 50 | 5 |
| AD-1640465.1 | 940 | 52 | 6 | 61 | 17 |
| AD-1640716.2 | 942 | 66 | 8 | 49 | 10 |
| AD-1640717.2 | 943 | 41 | 1 | 42 | 14 |
| AD-1640718.2 | 944 | 37 | 4 | 31 | 8 |
| AD-1640719.2 | 946 | 30 | 6 | 26 | 8 |
| AD-1640467.1 | 947 | 12 | 3 | 19 | 3 |
| AD-1640468.1 | 947 | 18 | 8 | 21 | 8 |
| AD-1640466.1 | 947 | 17 | 1 | 25 | 6 |
| AD-1640469.1 | 948 | 14 | 1 | 21 | 8 |
| AD-1640470.1 | 948 | 22 | 7 | 23 | 7 |
| AD-1640720.2 | 986 | 45 | 8 | 42 | 12 |
| AD-1640471.1 | 987 | 14 | 1 | 17 | 5 |
| AD-1640721.2 | 988 | 22 | 4 | 21 | 8 |
| AD-1640722.2 | 989 | 27 | 6 | 22 | 10 |
| AD-1640723.2 | 990 | 25 | 3 | 20 | 7 |
| AD-1640472.1 | 991 | 17 | 6 | 24 | 8 |
| AD-1640474.1 | 992 | 16 | 3 | 19 | 6 |
| AD-1640724.2 | 992 | 49 | 6 | 28 | 6 |
| AD-1640473.1 | 992 | 41 | 8 | 43 | 14 |
| AD-1640477.1 | 993 | 13 | 9 | 14 | 4 |
| AD-1640476.1 | 993 | 13 | 2 | 15 | 3 |
| AD-1640475.1 | 993 | 11 | 1 | 15 | 7 |
| AD-1640478.1 | 994 | 9 | 5 | 13 | 7 |
| AD-1640725.2 | 995 | 22 | 4 | 21 | 8 |
| AD-1640726.2 | 996 | 28 | 4 | 25 | 10 |
| AD-1640479.1 | 997 | 18 | 1 | 26 | 6 |
| AD-1640481.1 | 999 | 18 | 2 | 23 | 10 |
| AD-1640727.2 | 999 | 41 | 6 | 31 | 10 |
| AD-1640480.1 | 999 | 28 | 7 | 38 | 8 |
| AD-1640482.1 | 1000 | 19 | 3 | 21 | 3 |
| AD-1640483.1 | 1000 | 13 | 2 | 21 | 8 |
| AD-1640485.1 | 1001 | 17 | 1 | 21 | 10 |
| AD-1640486.1 | 1001 | 16 | 1 | 21 | 4 |
| AD-1640484.1 | 1001 | 23 | 3 | 26 | 5 |
| AD-1640488.1 | 1002 | 17 | 3 | 32 | 13 |
| AD-1640487.1 | 1002 | 43 | 12 | 61 | 11 |
| AD-1640490.1 | 1003 | 28 | 6 | 36 | 9 |
| AD-1640489.1 | 1003 | 27 | 8 | 44 | 8 |
| AD-1640728.2 | 1003 | 72 | 12 | 61 | 24 |
| AD-1640491.1 | 1004 | 17 | 5 | 20 | 5 |
| AD-1640729.2 | 1005 | 27 | 5 | 21 | 10 |
| AD-1640492.1 | 1006 | 29 | 5 | 38 | 5 |
| AD-1640730.2 | 1007 | 30 | 5 | 21 | 10 |
| AD-1640731.2 | 1008 | 16 | 4 | 20 | 9 |
| AD-1640732.2 | 1010 | 22 | 4 | 16 | 7 |
| AD-1640495.1 | 1011 | 27 | 4 | 20 | 6 |
| AD-1640494.1 | 1011 | 19 | 5 | 22 | 6 |
| AD-1640493.1 | 1011 | 50 | 6 | 36 | 5 |
| AD-1640497.1 | 1012 | 9 | 2 | 14 | 5 |
| AD-1640496.1 | 1012 | 16 | 6 | 17 | 6 |
| AD-1640498.1 | 1013 | 8 | 2 | 13 | 5 |
| AD-1640499.1 | 1013 | 14 | 3 | 18 | 11 |
| AD-1640500.1 | 1015 | 17 | 5 | 20 | 9 |
| AD-1640733.2 | 1015 | 26 | 3 | 21 | 9 |
| AD-1640501.1 | 1015 | 18 | 4 | 24 | 11 |
| AD-1640503.1 | 1018 | 16 | 4 | 20 | 10 |
| AD-1640502.1 | 1018 | 16 | 2 | 22 | 12 |
| AD-1640505.1 | 1019 | 15 | 3 | 16 | 5 |
| AD-1640504.1 | 1019 | 15 | 1 | 19 | 10 |
| AD-1640506.1 | 1020 | 19 | 5 | 22 | 8 |
| AD-1640734.2 | 1021 | 22 | 3 | 14 | 6 |
| AD-1640507.1 | 1021 | 14 | 3 | 15 | 7 |
| AD-1640508.1 | 1021 | 14 | 2 | 16 | 8 |
| AD-1640510.1 | 1023 | 20 | 5 | 18 | 6 |
| AD-1640509.1 | 1023 | 24 | 4 | 23 | 11 |
| AD-1640511.1 | 1026 | 16 | 6 | 19 | 8 |
| AD-1640735.2 | 1027 | 25 | 1 | 15 | 7 |
| AD-1640513.1 | 1028 | 17 | 2 | 19 | 10 |
| AD-1640512.1 | 1028 | 27 | 8 | 45 | 4 |
| AD-1640516.1 | 1029 | 12 | 0 | 14 | 7 |
| AD-1640515.1 | 1029 | 12 | 3 | 15 | 6 |
| AD-1640514.1 | 1029 | 20 | 3 | 30 | 3 |
| AD-1640518.1 | 1030 | 13 | 3 | 15 | 4 |
| AD-1640517.1 | 1030 | 19 | 3 | 16 | 4 |
| AD-1640520.1 | 1031 | 24 | 4 | 21 | 6 |
| AD-1640519.1 | 1031 | 29 | 3 | 28 | 4 |
| AD-1640522.1 | 1032 | 19 | 4 | 17 | 5 |
| AD-1640521.1 | 1032 | 17 | 2 | 18 | 3 |
| AD-1640524.1 | 1033 | 16 | 3 | 17 | 6 |
| AD-1640523.1 | 1033 | 22 | 5 | 23 | 7 |
| AD-1640736.2 | 1034 | 33 | 4 | 27 | 8 |
| AD-1640525.1 | 1034 | 30 | 4 | 27 | 4 |
| AD-1640526.1 | 1035 | 16 | 3 | 17 | 6 |
| AD-1640527.1 | 1035 | 16 | 3 | 19 | 6 |
| AD-1640737.2 | 1036 | 38 | 5 | 27 | 9 |
| AD-1640738.2 | 1037 | 27 | 4 | 21 | 8 |
| AD-1640528.1 | 1038 | 18 | 5 | 17 | 7 |
| AD-1640529.1 | 1039 | 52 | 10 | 49 | 5 |
| AD-1640739.2 | 1040 | 37 | 5 | 27 | 11 |
| AD-1640530.1 | 1041 | 26 | 6 | 23 | 6 |
| AD-1640531.1 | 1041 | 19 | 3 | 24 | 5 |
| AD-1640532.1 | 1041 | 22 | 4 | 26 | 3 |
| AD-1640535.1 | 1042 | 17 | 1 | 20 | 3 |
| AD-1640534.1 | 1042 | 20 | 3 | 26 | 5 |
| AD-1640533.1 | 1042 | 34 | 3 | 34 | 3 |
| AD-1640536.1 | 1043 | 41 | 2 | 41 | 3 |
| AD-1640740.2 | 1044 | 24 | 8 | 20 | 6 |
| AD-1640537.1 | 1044 | 18 | 2 | 22 | 5 |
| AD-1640539.1 | 1045 | 21 | 3 | 19 | 3 |
| AD-1640538.1 | 1045 | 23 | 6 | 22 | 1 |
| AD-1640741.2 | 1066 | 77 | 23 | 64 | 22 |
| AD-1640540.1 | 1069 | 39 | 4 | 41 | 7 |
| AD-1640541.1 | 1070 | 40 | 4 | 37 | 1 |
| AD-1640742.2 | 1071 | 24 | 4 | 27 | 12 |
| AD-1640542.1 | 1072 | 32 | 2 | 30 | 3 |
| AD-1640743.2 | 1073 | 28 | 5 | 25 | 9 |
| AD-1640744.2 | 1074 | 32 | 5 | 30 | 11 |
| AD-1640543.1 | 1075 | 20 | 3 | 20 | 5 |
| AD-1640745.2 | 1076 | 27 | 5 | 22 | 9 |
| AD-1640544.1 | 1077 | 77 | 21 | 47 | 8 |
| AD-1640547.1 | 1078 | 22 | 7 | 21 | 5 |
| AD-1640546.1 | 1078 | 22 | 9 | 24 | 6 |
| AD-1640545.1 | 1078 | 24 | 3 | 26 | 4 |
| AD-1640746.2 | 1079 | 25 | 8 | 19 | 9 |
| AD-1640549.1 | 1079 | 18 | 3 | 21 | 4 |
| AD-1640548.1 | 1079 | 25 | 5 | 25 | 2 |
| AD-1640551.1 | 1080 | 21 | 5 | 24 | 5 |
| AD-1640550.1 | 1080 | 29 | 6 | 27 | 4 |
| AD-1640552.1 | 1081 | 21 | 4 | 19 | 4 |
| AD-1640553.1 | 1082 | 14 | 3 | 17 | 5 |
| AD-1640747.2 | 1083 | 28 | 9 | 20 | 7 |
| AD-1640555.1 | 1085 | 20 | 5 | 20 | 4 |
| AD-1640748.2 | 1085 | 25 | 5 | 26 | 11 |
| AD-1640554.1 | 1085 | 30 | 6 | 27 | 4 |
| AD-1640558.1 | 1086 | 28 | 5 | 27 | 7 |
| AD-1640557.1 | 1086 | 41 | 7 | 36 | 4 |
| AD-1640556.1 | 1086 | 63 | 15 | 61 | 2 |
| AD-1640559.1 | 1087 | 36 | 4 | 27 | 4 |
| AD-1640560.1 | 1087 | 32 | 9 | 28 | 9 |
| AD-1640561.1 | 1088 | 29 | 3 | 31 | 4 |
| AD-1640562.1 | 1088 | 31 | 5 | 35 | 1 |
| AD-1640564.1 | 1089 | 19 | 2 | 20 | 5 |
| AD-1640563.1 | 1089 | 17 | 4 | 22 | 5 |
| AD-1640567.1 | 1090 | 21 | 2 | 20 | 5 |
| AD-1640565.1 | 1090 | 22 | 2 | 25 | 8 |
| AD-1640566.1 | 1090 | 28 | 10 | 26 | 3 |
| AD-1640569.1 | 1091 | 14 | 1 | 16 | 5 |
| AD-1640568.1 | 1091 | 16 | 1 | 17 | 6 |
| AD-1640571.1 | 1092 | 11 | 2 | 17 | 11 |
| AD-1640749.2 | 1092 | 22 | 2 | 19 | 11 |
| AD-1640570.1 | 1092 | 21 | 1 | 23 | 5 |
| AD-1640750.2 | 1093 | 12 | 2 | 12 | 7 |
| AD-1640572.1 | 1093 | 14 | 5 | 20 | 15 |
| AD-1640573.1 | 1094 | 37 | 4 | 28 | 2 |
| AD-1640751.2 | 1095 | 33 | 7 | 28 | 9 |
| AD-1640574.1 | 1096 | 68 | 17 | 71 | 21 |
| AD-1640752.2 | 1097 | 57 | 12 | 37 | 10 |
| AD-1640753.2 | 1098 | 49 | 15 | 31 | 13 |
| AD-1640575.1 | 1098 | 48 | 10 | 53 | 8 |
| AD-1640576.1 | 1099 | 24 | 4 | 27 | 4 |
| AD-1640578.1 | 1100 | 22 | 5 | 32 | 5 |
| AD-1640754.2 | 1100 | 46 | 13 | 35 | 9 |
| AD-1640577.1 | 1100 | 30 | 8 | 37 | 10 |
| AD-1640580.1 | 1102 | 27 | 4 | 23 | 3 |
| AD-1640579.1 | 1102 | 37 | 11 | 35 | 5 |
| AD-1640582.1 | 1105 | 29 | 9 | 25 | 8 |
| AD-1640581.1 | 1105 | 20 | 3 | 27 | 5 |
| AD-1640583.1 | 1106 | 32 | 11 | 33 | 5 |
| AD-1640584.1 | 1106 | 24 | 5 | 34 | 11 |
| AD-1640585.1 | 1106 | 27 | 10 | 35 | 6 |
| AD-1640755.2 | 1107 | 56 | 17 | 40 | 14 |
| AD-1640586.1 | 1108 | 24 | 2 | 29 | 2 |
| AD-1640587.1 | 1108 | 23 | 3 | 30 | 5 |
| AD-1640590.1 | 1109 | 13 | 2 | 20 | 5 |
| AD-1640589.1 | 1109 | 16 | 3 | 25 | 6 |
| AD-1640588.1 | 1109 | 34 | 2 | 50 | 15 |
| AD-1640591.1 | 1110 | 28 | 3 | 35 | 6 |
| AD-1640756.2 | 1111 | 24 | 7 | 18 | 7 |
| AD-1640593.1 | 1111 | 20 | 2 | 22 | 6 |
| AD-1640592.1 | 1111 | 17 | 2 | 23 | 5 |
| AD-1640595.1 | 1112 | 13 | 3 | 20 | 6 |
| AD-1640594.1 | 1112 | 14 | 3 | 21 | 6 |
| AD-1640596.1 | 1112 | 15 | 2 | 22 | 7 |
| AD-1640597.1 | 1113 | 11 | 1 | 20 | 4 |
| AD-1640598.1 | 1113 | 15 | 2 | 22 | 5 |
| AD-1640599.1 | 1115 | 16 | 1 | 25 | 5 |
| AD-1640600.1 | 1115 | 23 | 2 | 29 | 6 |
| AD-1640601.1 | 1117 | 15 | 3 | 18 | 4 |
| AD-1640602.1 | 1117 | 13 | 1 | 18 | 5 |
| AD-1640757.2 | 1118 | 23 | 3 | 17 | 9 |
| AD-1640603.1 | 1118 | 13 | 3 | 20 | 6 |
| AD-1640604.1 | 1118 | 14 | 1 | 20 | 9 |
| AD-1640606.1 | 1119 | 11 | 2 | 15 | 6 |
| AD-1640605.1 | 1119 | 11 | 3 | 16 | 5 |
| AD-1640758.2 | 1119 | 22 | 3 | 17 | 8 |
| AD-1640607.1 | 1120 | 29 | 7 | 28 | 6 |
| AD-1640759.2 | 1122 | 70 | 4 | 46 | 20 |
| AD-1640760.2 | 1123 | 54 | 20 | 34 | 17 |
| AD-1640761.2 | 1124 | 47 | 24 | 29 | 18 |
| AD-1640608.1 | 1125 | 30 | 2 | 33 | 6 |
| AD-1640609.1 | 1126 | 35 | 3 | 29 | 8 |
| AD-1640611.1 | 1127 | 18 | 2 | 22 | 5 |
| AD-1640610.1 | 1127 | 17 | 3 | 23 | 4 |
| AD-1640612.1 | 1128 | 23 | 3 | 23 | 3 |
| AD-1640613.1 | 1128 | 25 | 2 | 25 | 4 |
| AD-1640616.1 | 1131 | 19 | 3 | 19 | 4 |
| AD-1640615.1 | 1131 | 16 | 3 | 21 | 8 |
| AD-1640614.1 | 1131 | 25 | 3 | 27 | 5 |
| AD-1640617.1 | 1132 | 36 | 7 | 38 | 3 |
| AD-1640618.1 | 1132 | 44 | 5 | 41 | 5 |
| AD-1640762.2 | 1134 | 35 | 20 | 29 | 18 |
| AD-1640763.2 | 1135 | 21 | 9 | 20 | 13 |
| AD-1640619.1 | 1136 | 15 | 2 | 14 | 5 |
| AD-1640764.2 | 1137 | 14 | 11 | 16 | 10 |
| AD-1640620.1 | 1138 | 17 | 1 | 22 | 4 |
| AD-1640621.1 | 1139 | 14 | 2 | 15 | 3 |
| AD-1640623.1 | 1140 | 15 | 1 | 17 | 6 |
| AD-1640765.2 | 1140 | 29 | 9 | 19 | 9 |
| AD-1640622.1 | 1140 | 19 | 4 | 33 | 3 |
| AD-1640625.1 | 1141 | 16 | 0 | 17 | 3 |
| AD-1640624.1 | 1141 | 29 | 3 | 39 | 4 |
| AD-1640626.1 | 1142 | 14 | 2 | 17 | 4 |
| AD-1640627.1 | 1142 | 15 | 3 | 18 | 5 |
| AD-1640629.1 | 1143 | 9 | 1 | 12 | 6 |
| AD-1640628.1 | 1143 | 11 | 1 | 16 | 3 |
| AD-1640631.1 | 1144 | 10 | 1 | 14 | 4 |
| AD-1640630.1 | 1144 | 14 | 3 | 17 | 4 |
| AD-1640632.1 | 1145 | 27 | 3 | 29 | 5 |
| AD-1640633.1 | 1145 | 34 | 4 | 30 | 3 |
| AD-1640636.1 | 1146 | 12 | 3 | 14 | 3 |
| AD-1640634.1 | 1146 | 15 | 3 | 18 | 3 |
| AD-1640635.1 | 1146 | 20 | 2 | 28 | 3 |
| AD-1640766.2 | 1147 | 29 | 10 | 19 | 9 |
| AD-1640637.1 | 1149 | 9 | 2 | 13 | 4 |
| AD-1640767.2 | 1150 | 41 | 9 | 24 | 10 |
| AD-1640640.1 | 1151 | 28 | 4 | 31 | 4 |
| AD-1640639.1 | 1151 | 27 | 6 | 39 | 7 |
| AD-1640638.1 | 1151 | 58 | 3 | 73 | 5 |
| AD-1640641.1 | 1152 | 11 | 2 | 15 | 5 |
| AD-1640642.1 | 1152 | 15 | 2 | 16 | 4 |
| AD-1640644.1 | 1153 | 9 | 1 | 14 | 3 |
| AD-1640643.1 | 1153 | 18 | 2 | 20 | 3 |
| AD-1640647.1 | 1154 | 18 | 2 | 26 | 0 |
| AD-1640646.1 | 1154 | 24 | 5 | 26 | 3 |
| AD-1640645.1 | 1154 | 40 | 12 | 48 | 2 |
| AD-1640648.1 | 1155 | 18 | 3 | 18 | 3 |
| AD-1640649.1 | 1156 | 17 | 2 | 20 | 6 |
| AD-1640768.2 | 1157 | 41 | 10 | 27 | 14 |
| AD-1640651.1 | 1160 | 11 | 2 | 13 | 4 |
| AD-1640652.1 | 1160 | 12 | 1 | 16 | 1 |
| AD-1640650.1 | 1160 | 15 | 1 | 17 | 4 |

### Example 2. Design, and Synthesis of Additional dsRNA Duplexes

[0706] Additional siRNAs were designed, synthesized, and prepared using methods known in the art and described above in Example 1.

[0707] A detailed list of the unmodified HTT sense and antisense strand nucleotide sequences is shown in Table 5. A detailed list of the modified HTT sense and antisense strand nucleotide sequences is shown in Table 6.

TABLE 5
Unmodified Sense and Antisense Strand Sequences of Intron 1 Targeting HTT dsRNA Agents

| | | SEQ | Range in | | SEQ | Range in |
|---|---|---|---|---|---|---|
| Duplex | Sense strand sequence | ID | NG_ | Antisense strand sequence | ID | NG_ |
| Name | 5′ to 3′ | NO. | 009378.1 | 5′ to 3′ | NO. | 009378.1 |
| AD-1718647 | UAAAGUGGUGAACUUACGUGA | | 6193-6213 | UCACGUAAGUUCACCACUUUACU | | 6191-6213 |
| AD-1718648 | UAAAGUGGUGAACUUACGUGA | | 6193-6213 | UCACGUAAGUUCACCACUUUACU | | 6191-6213 |
| AD-1718649 | AAAGUGGUGAACUUACGUGGA | | 6194-6214 | UCCACGTAAGUTCACCACUUUAC | | 6192-6214 |
| AD-1718653 | AACUUACGUGGUGAUUAAUGA | | 6203-6223 | UCAUUAAUCACCACGUAAGUUCA | | 6201-6223 |
| AD-1718654 | AACUUACGUGGUGAUUAAUGA | | 6203-6223 | UCAUTAAUCACCACGUAAGUUCA | | 6201-6223 |
| AD-1718655 | CAGGACAUUUCAUUUAGUUCA | | 6070-6090 | UGAACUAAAUGAAAUGUCCUGAC | | 6068-6090 |
| AD-1718656 | CAGGACAUUUCAUUUAGUUCA | | 6070-6090 | UGAACUAAAUGAAAUGUCCUGAC | | 6068-6090 |
| AD-1718660 | CAUUGUCAGGACAUUUCAUUA | | 6064-6084 | UAAUGAAAUGUCCUGACAAUGUA | | 6062-6084 |
| AD-1718662 | ACUUACGUGGUGAUUAAUGAA | | 6204-6224 | UTCATUAAUCACCACGUAAGUUC | | 6202-6224 |
| AD-1718663 | AAGUGGUGAACUUACGUGGUA | | 6195-6215 | UACCACGUAAGTUCACCACUUUA | | 6193-6215 |
| AD-1718669 | GCAGUGGAUGACAUAAUGCUA | | 5924-5944 | UAGCAUTAUGUCAUCCACUGCCC | | 5922-5944 |
| AD-1718670 | GCAGUGGAUGACAUAAUGCUA | | 5924-5944 | UAGCAUUAUGUCAUCCACUGCCC | | 5922-5944 |
| AD-1718673 | AUUUAGUUCAUGAUCACGGUA | | 6081-6101 | UACCGUGAUCATGAACUAAAUGA | | 6079-6101 |
| AD-1718674 | AUUUAGUUCAUGAUCACGGUA | | 6081-6101 | UACCGUGAUCAUGAACUAAAUGA | | 6079-6101 |
| AD-1718676 | UAGUUCAUGAUCACGGUGGUA | | 6084-6104 | UACCACCGUGATCAUGAACUAAA | | 6082-6104 |
| AD-1718677 | GUUCAUGAUCACGGUGGUAGA | | 6086-6106 | UCUACCACCGUGAUCAUGAACUA | | 6084-6106 |
| AD-1718678 | UGGUGAUUAAUGAAAUUAUCA | | 6211-6231 | UGAUAAUUUCAUUAAUCACCACG | | 6209-6231 |
| AD-1718679 | UGGUGAUUAAUGAAAUUAUCA | | 6211-6231 | UGAUAATUUCATUAAUCACCACG | | 6209-6231 |
| AD-1718680 | UGGUGAUUAAUGAAAUUAUCA | | 6211-6231 | UGAUAATUUCAUUAAUCACCACG | | 6209-6231 |
| AD-1718682 | GGACAUUUCAUUUAGUUCAUA | | 6072-6092 | UAUGAACUAAAUGAAAUGUCCUG | | 6070-6092 |
| AD-1718683 | GGACAUUUCAUUUAGUUCAUA | | 6072-6092 | UAUGAACUAAATGAAAUGUCCUG | | 6070-6092 |
| AD-1718702 | CAUUUAGUUCAUGAUCACGGA | | 6080-6100 | UCCGTGAUCAUGAACUAAAUGAA | | 6078-6100 |
| AD-1718715 | CUACAUUGUCAGGACAUUUCA | | 6061-6081 | UGAAAUGUCCUGACAAUGUAGGA | | 6059-6081 |
| AD-1718717 | UUCAUUUAGUUCAUGAUCACA | | 6078-6098 | UGUGAUCAUGAACUAAAUGAAAU | | 6076-6098 |
| AD-1718721 | GUGAACUUACGUGGUGAUUAA | | 6200-6220 | UUAATCACCACGUAAGUUCACCA | | 6198-6220 |

TABLE 6
Modified Sense and Antisense Strand Sequences of Intron 1 Targeting HTT dsRNA Agents

| | | SEQ ID | | SEQ ID | | SEQ ID |
|---|---|---|---|---|---|---|
| Duplex Name | Sense Strand Sequence 5′ to 3′ | NO. | Antisense Strand Sequence 5′ to 3′ | NO. | mRNA target sequence | NO. |
| AD-1718647 | usasaag(Uhd)GfgUfGfAfacuuacgusgsa | | VPusCfsacgUfaAfGfuucaCfcAfcuuuascsu | | AGTAAAGTGGTGAACTTACGTGG | |
| AD-1718648 | usasaag(Uhd)ggUfGfAfacuuacgusgsa | | VPusdCsacdGudAaguudCaCfcacuuuascsu | | AGTAAAGTGGTGAACTTACGTGG | |
| AD-1718649 | asasagu(Ghd)guGfAfAfcuuacgugsgsa | | VPusdCscadCgdTaagudTcAfccacuuusasc | | GTAAAGTGGTGAACTTACGTGGT | |
| AD-1718653 | asascuu(Ahd)CfgUfGfGfugauuaausgsa | | VPusCfsauuAfaUfCfaccaCfgUfaaguuscsa | | TGAACTTACGTGGTGATTAATGA | |
| AD-1718654 | asascuu(Ahd)cgUfGfGfugauuaausgsa | | VPusdCsaudTadAucacdCaCfguaaguuscsa | | TGAACTTACGTGGTGATTAATGA | |
| AD-1718655 | csasgga(Chd)auUfUfCfauuuaguuscsa | | VPusdGsaadCudAaaugdAaAfuguccugsasc | | GTCAGGACATTTCATTTAGTTCA | |
| AD-1718656 | csasgga(Chd)AfuUfUfCfauuuaguuscsa | | VPusGfsaacUfaAfAfugaaAfuGfuccugsasc | | GTCAGGACATTTCATTTAGTTCA | |
| AD-1718660 | csasuug(Uhd)CfaGfGfAfcauuucaususa | | VPusAfsaugAfaAfUfguccUfgAfcaaugsusa | | TACATTGTCAGGACATTTCATTT | |
| AD-1718662 | ascsuua(Chd)guGfGfUfgauuaaugsasa | | VPusdTscadTudAaucadCcAfcguaagususc | | GAACTTACGTGGTGATTAATGAA | |
| AD-1718663 | asasgug(Ghd)ugAfAfCfuuacguggsusa | | VPusdAsccdAcdGuaagdTuCfaccacuususa | | TAAAGTGGTGAACTTACGTGGTG | |
| AD-1718669 | gscsagu(Ghd)gaUfGfAfcauaaugcsusa | | VPusdAsgcdAudTaugudCaUfccacugcscsc | | GGGCAGTGGATGACATAATGCTT | |
| AD-1718670 | gscsagu(Ghd)GfaUfGfAfcauaaugcsusa | | VPusAfsgcaUfuAfUfgucaUfcCfacugcscsc | | GGGCAGTGGATGACATAATGCTT | |
| AD-1718673 | asusuua(Ghd)uuCfAfUfgaucacggsusa | | VPusdAsccdGudGaucadTgAfacuaaausgsa | | TCATTTAGTTCATGATCACGGTG | |
| AD-1718674 | asusuua(Ghd)UfuCfAfUfgaucacggsusa | | VPusAfsccgUfgAfUfcaugAfaCfuaaausgsa | | TCATTTAGTTCATGATCACGGTG | |
| AD-1718676 | usasguu(Chd)auGfAfUfcacgguggsusa | | VPusdAsccdAcdCgugadTcAfugaacuasasa | | TTTAGTTCATGATCACGGTGGTA | |
| AD-1718677 | gsusuca(Uhd)gaUfCfAfcggugguasgsa | | VPusdCsuadCcdAccgudGaUfcaugaacsusa | | TAGTTCATGATCACGGTGGTAGT | |
| AD-1718678 | usgsgug(Ahd)UfuAfAfUfgaaauuauscsa | | VPusGfsauaAfuUfUfcauuAfaUfcaccascsg | | CGTGGTGATTAATGAAATTATCT | |
| AD-1718679 | usgsgug(Ahd)uuAfAfUfgaaauuauscsa | | VPusdGsaudAadTuucadTuAfaucaccascsg | | CGTGGTGATTAATGAAATTATCT | |
| AD-1718680 | usgsgug(Ahd)UfuAfAfUfgaaauuauscsa | | VPusGfsaudAa(Tgn)uucauuAfaUfcaccascsg | | CGTGGTGATTAATGAAATTATCT | |
| AD-1718682 | gsgsaca(Uhd)UfuCfAfUfuuaguucasusa | | VPusAfsugaAfcUfAfaaugAfaAfuguccsusg | | CAGGACATTTCATTTAGTTCATG | |
| AD-1718683 | gsgsaca(Uhd)uuCfAfUfuuaguucasusa | | VPusdAsugdAadCuaaadTgAfaauguccsusg | | CAGGACATTTCATTTAGTTCATG | |
| AD-1718702 | csasuuu(Ahd)guUfCfAfugaucacgsgsa | | VPusdCscgdTgdAucaudGaAfcuaaaugsasa | | TTCATTTAGTTCATGATCACGGT | |
| AD-1718715 | csusaca(Uhd)UfgUfCfAfggacauuuscsa | | VPusGfsaadAu(G2p)uccugaCfaAfuguagsgsa | | TCCTACATTGTCAGGACATTTCA | |
| AD-1718717 | ususcau(Uhd)UfaGfUfUfcaugaucascsa | | VPusGfsugdAu(C2p)augaacUfaAfaugaasasu | | ATTTCATTTAGTTCATGATCACG | |
| AD-1718721 | gsusgaa(Chd)UfuAfCfGfuggugauusasa | | VPusUfsaadTc(Agn)ccacguAfaGfuucacscsa | | TGGTGAACTTACGTGGTGATTAA | |

The application's sequence listing, which the Patent Office published only in electronic form, follows.

SEQUENCE LISTING (1736 sequences)

SEQ ID NO: 1 - DNA, 13498 bp, Homo sapiens
  source 1..13498: mol_type = genomic DNA
gctgccgggacgggtccaagatggacggccgctcaggttctgcttttacctgcggcccagagccccattcattgccccggtgctgagcggcgccgcgagtcggcccgaggcctccggggactgccgtgccgggcgggagaccgccatggcgaccctggaaaagctgatgaaggccttcgagtccctcaagtccttccagcagcagcagcagcagcagcagcagcagcagcagcagcagcagcagcagcagcagcagcagcaacagccgccaccgccgccgccgccgccgccgcctcctcagcttcctcagccgccgccgcaggcacagccgctgctgcctcagccgcagccgcccccgccgccgcccccgccgccacccggcccggctgtggctgaggagccgctgcaccgaccaaagaaagaactttcagctaccaagaaagaccgtgtgaatcattgtctgacaatatgtgaaaacatagtggcacagtctgtcagaaattctccagaatttcagaaacttctgggcatcgctatggaactttttctgctgtgcagtgatgacgcagagtcagatgtcaggatggtggctgacgaatgcctcaacaaagttatcaaagctttgatggattctaatcttccaaggttacagctcgagctctataaggaaattaaaaagaatggtgcccctcggagtttgcgtgctgccctgtggaggtttgctgagctggctcacctggttcggcctcagaaatgcaggccttacctggtgaaccttctgccgtgcctgactcgaacaagcaagagacccgaagaatcagtccaggagaccttggctgcagctgttcccaaaattatggcttcttttggcaattttgcaaatgacaatgaaattaaggttttgttaaaggccttcatagcgaacctgaagtcaagctcccccaccattcggcggacagcggctggatcagcagtgagcatctgccagcactcaagaaggacacaatatttctatagttggctactaaatgtgctcttaggcttactcgttcctgtcgaggatgaacactccactctgctgattcttggcgtgctgctcaccctgaggtatttggtgcccttgctgcagcagcaggtcaaggacacaagcctgaaaggcagcttcggagtgacaaggaaagaaatggaagtctctccttctgcagagcagcttgtccaggtttatgaactgacgttacatcatacacagcaccaagaccacaatgttgtgaccggagccctggagctgttgcagcagctcttcagaacgcctccacccgagcttctgcaaaccctgaccgcagtcgggggcattgggcagctcaccgctgctaaggaggagtctggtggccgaagccgtagtgggagtattgtggaacttatagctggagggggttcctcatgcagccctgtcctttcaagaaaacaaaaaggcaaagtgctcttaggagaagaagaagccttggaggatgactctgaatcgagatcggatgtcagcagctctgccttaacagcctcagtgaaggatgagatcagtggagagctggctgcttcttcaggggtttccactccagggtcagcaggtcatgacatcatcacagaacagccacggtcacagcacacactgcaggcggactcagtggatctggccagctgtgacttgacaagctctgccactgatggggatgaggaggatatcttgagccacagctccagccaggtcagcgccgtcccatctgaccctgccatggacctgaatgatgggacccaggcctcgtcgcccatcagcgacagctcccagaccaccaccgaagggcctgattcagctgttaccccttcagacagttctgaaattgtgttagacggtaccgacaaccagtatttgggcctgcagattggacagccccaggatgaagatgaggaagccacaggtattcttcctgatgaagcctcggaggccttcaggaactcttccatggcccttcaacaggcacatttattgaaaaacatgagtcactgcaggcagccttctgacagcagtgttgataaatttgtgttgagagatgaagctactgaaccgggtgatcaagaaaacaagccttgccgcatcaaaggtgacattggacagtccactgatgatgactctgcacctcttgtccattgtgtccgccttttatctgcttcgtttttgctaacagggggaaaaaatgtgctggttccggacagggatgtgagggtcagcgtgaaggccctggccctcagctgtgtgggagcagctgtggccctccacccggaatctttcttcagcaaactctataaagttcctcttgacaccacggaataccctgaggaacagtatgtctcagacatcttgaactacatcgatcatggagacccacaggttcgaggagccactgccattctctgtgggaccctcatctgctccatcctcagcaggtcccgcttccacgtgggagattggatgggcaccattagaaccctcacaggaaatacattttctttggcggattgcattcctttgctgcggaaaacactgaaggatgagtcttctgttacttgcaagttagcttgtacagctgtgaggaactgtgtcatgagtctctgcagcagcagctacagtgagttaggactgcagctgatcatcgatgtgctgactctgaggaacagttcctattggctggtgaggacagagcttctggaaacccttgcagagattgacttcaggctggtgagctttttggaggcaaaagcagaaaacttacacagaggggctcatcattatacagggcttttaaaactgcaagaacgagtgctcaataatgttgtcatccatttgcttggagatgaagaccccagggtgcgacatgttgccgcagcatcactaattaggcttgtcccaaagctgttttataaatgtgaccaaggacaagctgatccagtagtggccgtggcaagagatcaaagcagtgtttacctgaaacttctcatgcatgagacgcagcctccatctcatttctccgtcagcacaataaccagaatatatagaggctataacctactaccaagcataacagacgtcactatggaaaataacctttcaagagttattgcagcagtttctcatgaactaatcacatcaaccaccagagcactcacatttggatgctgtgaagctttgtgtcttctttccactgccttcccagtttgcatttggagtttaggttggcactgtggagtgcctccactgagtgcctcagatgagtctaggaagagctgtaccgttgggatggccacaatgattctgaccctgctctcgtcagcttggttcccattggatctctcagcccatcaagatgctttgattttggccggaaacttgcttgcagccagtgctcccaaatctctgagaagttcatgggcctctgaagaagaagccaacccagcagccaccaagcaagaggaggtctggccagccctgggggaccgggccctggtgcccatggtggagcagctcttctctcacctgctgaaggtgattaacatttgtgcccacgtcctggatgacgtggctcctggacccgcaataaaggcagccttgccttctctaacaaaccccccttctctaagtcccatccgacgaaaggggaaggagaaagaaccaggagaacaagcatctgtaccgttgagtcccaagaaaggcagtgaggccagtgcagcttctagacaatctgatacctcaggtcctgttacaacaagtaaatcctcatcactggggagtttctatcatcttccttcatacctcaaactgcatgatgtcctgaaagctacacacgctaactacaaggtcacgctggatcttcagaacagcacggaaaagtttggagggtttctccgctcagccttggatgttctttctcagatactagagctggccacactgcaggacattgggaagtgtgttgaagagatcctaggatacctgaaatcctgctttagtcgagaaccaatgatggcaactgtttgtgttcaacaattgttgaagactctctttggcacaaacttggcctcccagtttgatggcttatcttccaaccccagcaagtcacaaggccgagcacagcgccttggctcctccagtgtgaggccaggcttgtaccactactgcttcatggccccgtacacccacttcacccaggccctcgctgacgccagcctgaggaacatggtgcaggcggagcaggagaacgacacctcgggatggtttgatgtcctccagaaagtgtctacccagttgaagacaaacctcacgagtgtcacaaagaaccgtgcagataagaatgctattcataatcacattcgtttgtttgaacctcttgttataaaagctttaaaacagtacacgactacaacatgtgtgcagttacagaagcaggttttagatttgctggcgcagctggttcagttacgggttaattactgtcttctggattcagatcaggtgtttattggctttgtattgaaacagtttgaatacattgaagtgggccagttcagggaatcagaggcaatcattccaaacatctttttcttcttggtattactatcttatgaacgctatcattcaaaacagatcattggaattcctaaaatcattcagctctgtgatggcatcatggccagtggaaggaaggctgtgacacatgccataccggctctgcagcccatagtccacgacctctttgtattaagaggaacaaataaagctgatgcaggaaaagagcttgaaacccaaaaagaggtggtggtgtcaatgttactgagactcatccagtaccatcaggtgttggagatgttcattcttgtcctgcagcagtgccacaaggagaatgaagacaagtggaagcgactgtctcgacagatagctgacatcatcctcccaatgttagccaaacagcagatgcacattgactctcatgaagcccttggagtgttaaatacattatttgagattttggccccttcctccctccgtccggtagacatgcttttacggagtatgttcgtcactccaaacacaatggcgtccgtgagcactgttcaactgtggatatcgggaattctggccattttgagggttctgatttcccagtcaactgaagatattgttctttctcgtattcaggagctctccttctctccgtatttaatctcctgtacagtaattaataggttaagagatggggacagtacttcaacgctagaagaacacagtgaagggaaacaaataaagaatttgccagaagaaacattttcaaggtttctattacaactggttggtattcttttagaagacattgttacaaaacagctgaaggtggaaatgagtgagcagcaacatactttctattgccaggaactaggcacactgctaatgtgtctgatccacatcttcaagtctggaatgttccggagaatcacagcagctgccactaggctgttccgcagtgatggctgtggcggcagtttctacaccctggacagcttgaacttgcgggctcgttccatgatcaccacccacccggccctggtgctgctctggtgtcagatactgctgcttgtcaaccacaccgactaccgctggtgggcagaagtgcagcagaccccgaaaagacacagtctgtccagcacaaagttacttagtccccagatgtctggagaagaggaggattctgacttggcagccaaacttggaatgtgcaatagagaaatagtacgaagaggggctctcattctcttctgtgattatgtctgtcagaacctccatgactccgagcacttaacgtggctcattgtaaatcacattcaagatctgatcagcctttcccacgagcctccagtacaggacttcatcagtgccgttcatcggaactctgctgccagcggcctgttcatccaggcaattcagtctcgttgtgaaaacctttcaactccaaccatgctgaagaaaactcttcagtgcttggaggggatccatctcagccagtcgggagctgtgctcacgctgtatgtggacaggcttctgtgcacccctttccgtgtgctggctcgcatggtcgacatccttgcttgtcgccgggtagaaatgcttctggctgcaaatttacagagcagcatggcccagttgccaatggaagaactcaacagaatccaggaataccttcagagcagcgggctcgctcagagacaccaaaggctctattccctgctggacaggtttcgtctctccaccatgcaagactcacttagtccctctcctccagtctcttcccacccgctggacggggatgggcacgtgtcactggaaacagtgagtccggacaaagactggtacgttcatcttgtcaaatcccagtgttggaccaggtcagattctgcactgctggaaggtgcagagctggtgaatcggattcctgctgaagatatgaatgccttcatgatgaactcggagttcaacctaagcctgctagctccatgcttaagcctagggatgagtgaaatttctggtggccagaagagtgccctttttgaagcagcccgtgaggtgactctggcccgtgtgagcggcaccgtgcagcagctccctgctgtccatcatgtcttccagcccgagctgcctgcagagccggcggcctactggagcaagttgaatgatctgtttggggatgctgcactgtatcagtccctgcccactctggcccgggccctggcacagtacctggtggtggtctccaaactgcccagtcatttgcaccttcctcctgagaaagagaaggacattgtgaaattcgtggtggcaacccttgaggccctgtcctggcatttgatccatgagcagatcccgctgagtctggatctccaggcagggctggactgctgctgcctggccctgcagctgcctggcctctggagcgtggtctcctccacagagtttgtgacccacgcctgctccctcatctactgtgtgcacttcatcctggaggccgttgcagtgcagcctggagagcagcttcttagtccagaaagaaggacaaataccccaaaagccatcagcgaggaggaggaggaagtagatccaaacacacagaatcctaagtatatcactgcagcctgtgagatggtggcagaaatggtggagtctctgcagtcggtgttggccttgggtcataaaaggaatagcggcgtgccggcgtttctcacgccattgctaaggaacatcatcatcagcctggcccgcctgccccttgtcaacagctacacacgtgtgcccccactggtgtggaagcttggatggtcacccaaaccgggaggggattttggcacagcattccctgagatccccgtggagttcctccaggaaaaggaagtctttaaggagttcatctaccgcatcaacacactaggctggaccagtcgtactcagtttgaagaaacttgggccaccctccttggtgtcctggtgacgcagcccctcgtgatggagcaggaggagagcccaccagaagaagacacagagaggacccagatcaacgtcctggccgtgcaggccatcacctcactggtgctcagtgcaatgactgtgcctgtggccggcaacccagctgtaagctgcttggagcagcagccccggaacaagcctctgaaagctctcgacaccaggtttgggaggaagctgagcattatcagagggattgtggagcaagagattcaagcaatggtttcaaagagagagaatattgccacccatcatttatatcaggcatgggatcctgtcccttctctgtctccggctactacaggtgccctcatcagccacgagaagctgctgctacagatcaaccccgagcgggagctggggagcatgagctacaaactcggccaggtgtccatacactccgtgtggctggggaacagcatcacacccctgagggaggaggaatgggacgaggaagaggaggaggaggccgacgcccctgcaccttcgtcaccacccacgtctccagtcaactccaggaaacaccgggctggagttgacatccactcctgttcgcagtttttgcttgagttgtacagccgctggatcctgccgtccagctcagccaggaggaccccggccatcctgatcagtgaggtggtcagatcccttctagtggtctcagacttgttcaccgagcgcaaccagtttgagctgatgtatgtgacgctgacagaactgcgaagggtgcacccttcagaagacgagatcctcgctcagtacctggtgcctgccacctgcaaggcagctgccgtccttgggatggacaaggccgtggcggagcctgtcagccgcctgctggagagcacgctcaggagcagccacctgcccagcagggttggagccctgcacggcgtcctctatgtgctggagtgcgacctgctggacgacactgccaagcagctcatcccggtcatcagcgactatctcctctccaacctgaaagggatcgcccactgcgtgaacattcacagccagcagcacgtactggtcatgtgtgccactgcgttttacctcattgagaactatcctctggacgtagggccggaattttcagcatcaataatacagatgtgtggggtgatgctgtctggaagtgaggagtccaccccctccatcatttaccactgtgccctcagaggcctggagcgcctcctgctctctgagcagctctcccgcctggatgcagaatcgctggtcaagctgagtgtggacagagtgaacgtgcacagcccgcaccgggccatggcggctctgggcctgatgctcacctgcatgtacacaggaaaggagaaagtcagtccgggtagaacttcagaccctaatcctgcagcccccgacagcgagtcagtgattgttgctatggagcgggtatctgttctttttgataggatcaggaaaggctttccttgtgaagccagagtggtggccaggatcctgccccagtttctagacgacttcttcccaccccaggacatcatgaacaaagtcatcggagagtttctgtccaaccagcagccatacccccagttcatggccaccgtggtgtataaggtgtttcagactctgcacagcaccgggcagtcgtccatggtccgggactgggtcatgctgtccctctccaacttcacgcagagggccccggtcgccatggccacgtggagcctctcctgcttctttgtcagcgcgtccaccagcccgtgggtcgcggcgatcctcccacatgtcatcagcaggatgggcaagctggagcaggtggacgtgaaccttttctgcctggtcgccacagacttctacagacaccagatagaggaggagctcgaccgcagggccttccagtctgtgcttgaggtggttgcagccccaggaagcccatatcaccggctgctgacttgtttacgaaatgtccacaaggtcaccacctgctgagcgccatggtgggagagactgtgaggcggcagctggggccggagcctttggaagtctgcgcccttgtgccctgcctccaccgagccagcttggtccctatgggcttccgcacatgccgcgggcggccaggcaacgtgcgtgtctctgccatgtggcagaagtgctctttgtggcagtggccaggcagggagtgtctgcagtcctggtggggctgagcctgaggccttccagaaagcaggagcagctgtgctgcaccccatgtgggtgaccaggtcctttctcctgatagtcacctgctggttgttgccaggttgcagctgctcttgcatctgggccagaagtcctccctcctgcaggctggctgttggcccctctgctgtcctgcagtagaaggtgccgtgagcaggctttgggaacactggcctgggtctccctggtggggtgtgcatgccacgccccgtgtctggatgcacagatgccatggcctgtgctgggccagtggctgggggtgctagacacccggcaccattctcccttctctcttttcttctcaggatttaaaatttaattatatcagtaaagagattaattttaacgtaactctttctatgcccgtgtaaagtatgtgaatcgcaaggcctgtgctgcatgcgacagcgtccggggtggtggacagggcccccggccacgctccctctcctgtagccactggcatagccctcctgagcacccgctgacatttccgttgtacatgttcctgtttatgcattcacaaggtgactgggatgtagagaggcgttagtgggcaggtggccacagcaggactgaggacaggcccccattatcctaggggtgcgctcacctgcagcccctcctcctcgggcacagacgactgtcgttctccacccaccagtcagggacagcagcctccctgtcactcagctgagaaggccagccctccctggctgtgagcagcctccactgtgtccagagacatgggcctcccactcctgttccttgctagccctggggtggcgtctgcctaggagctggctggcaggtgttgggacctgctgctccatggatgcatgccctaagagtgtcactgagctgtgttttgtctgagcctctctcggtcaacagcaaagcttggtgtcttggcactgttagtgacagagcccagcatcccttctgcccccgttccagctgacatcttgcacggtgaccccttttagtcaggagagtgcagatctgtgctcatcggagactgccccacggccctgtcagagccgccactcctatccccaggccaggtccctggaccagcctcctgtttgcaggcccagaggagccaagtcattaaaatggaagtggattctggatggccgggctgctgctgatgtaggagctggatttgggagctctgcttgccgactggctgtgagacgaggcaggggctctgcttcctcagccctagaggcgagccaggcaaggttggcgactgtcatgtggcttggtttggtcatgcccgtcgatgttttgggtattgaatgtggtaagtggaggaaatgttggaactctgtgcaggtgctgccttgagacccccaagcttccacctgtccctctcctatgtggcagctggggagcagctgagatgtggacttgtatgctgcccacatacgtgagggggagctgaaagggagcccctcctctgagcagcctctgccaggcctgtatgaggcttttcccaccagctcccaacagaggcctcccccagccaggaccacctcgtcctcgtggcggggcagcaggagcggtagaaaggggtccgatgtttgaggaggcccttaagggaagctactgaattataacacgtaagaaaatcaccattccgtattggttgggggctcctgtttctcatcctagctttttcctggaaagcccgctagaaggtttgggaacgaggggaaagttctcagaactgttggctgctccccacccgcctcccgcctcccccgcaggttatgtcagcagctctgagacagcagtatcacaggccagatgttgttcctggctagatgtttacatttgtaagaaataacactgtgaatgtaaaacagagccattcccttggaatgcatatcgctgggctcaacatagagtttgtcttcctcttgtttacgacgtgatctaaaccagtccttagcaaggggctcagaacaccccgctctggcagtaggtgtcccccacccccaaagacctgcctgtgtgctccggagatgaatatgagctcattagtaaaaatgacttcacccacgcatatacataaagtatccatgcatgtgcatatagacacatctataattttacacacacacctctcaagacggagatgcatggcctctaagagtgcccgtgtcggttcttcctggaagttgactttccttagacccgccaggtcaagttagccgcgtgacggacatccaggcgtgggacgtggtcagggcagggctcattcattgcccactaggatcccactggcgaagatggtctccatatcagctctctgcagaagggaggaagactttatcatgttcctaaaaatctgtggcaagcacccatcgtattatccaaattttgttgcaaatgtgattaatttggttgtcaagttttgggggtgggctgtggggagattgcttttgttttcctgctggtaatatcgggaaagattttaatgaaaccagggtagaattgtttggcaatgcactgaagcgtgtttctttcccaaaatgtgcctcccttccgctgcgggcccagctgagtctatgtaggtgatgtttccagctgccaagtgctctttgttactgtccaccctcatttctgccagcgcatgtgtcctttcaaggggaaaatgtgaagctgaaccccctccagacacccagaatgtagcatctgagaaggccctgtgccctaaaggacacccctcgcccccatcttcatggagggggtcatttcagagccctcggagccaatgaacagctcctcctcttggagctgagatgagccccacgtggagctcgggacggatagtagacagcaataactcggtgtgtggccgcctggcaggtggaacttcctcccgttgcggggtggagtgaggttagttctgtgtgtctggtgggtggagtcaggcttctcttgctacctgtgagcatccttcccagcagacatcctcatcgggctttgtccctcccccgcttcctccctctgcggggaggacccgggaccacagctgctggccagggtagacttggagctgtcctccagaggggtcacgtgtaggagtgagaagaaggaagatcttgagagctgctgagggaccttggagagctcaggatggctcagacgaggacactcgcttgccgggcctgggcctcctgggaaggagggagctgctcagaatgccgcatgacaactgaaggcaacctggaaggttcaggggccgctcttcccccatgtgcctgtcacgctctggtgcagtcaaaggaacgccttcccctcagttgtttctaagagcagagtctcccgctgcaatctgggtggtaactgccagccttggaggatcgtggccaacgtggacctgcctacggagggtgggctctgacccaagtggggcctccttgtccaggtctcactgctttgcaccgtggtcagagggactgtcagctgagcttgagctcccctggagccagcagggctgtgatgggcgagtcccggagccccacccagacctgaatgcttctgagagcaaagggaaggactgacgagagatgtatatttaattttttaactgctgcaaacattgtacatccaaattaaaggaaaaaaatggaaaccatcaaaaaaaaaaaaaaaaaa

SEQ ID NO: 2 - DNA, 13237 bp, Mus musculus
  source 1..13237: mol_type = genomic DNA
gcactcgccgcgagggttgccgggacgggcccaagatggctgagcgccttggttccgcttctgcctgccgcgcagagccccattcattgccttgctgctaagtggcgccgcgtagtgccagtaggctccaagtcttcagggtctgtcccatcgggcaggaagccgtcatggcaaccctggaaaagctgatgaaggctttcgagtcgctcaagtcgtttcagcagcaacagcagcagcagccaccgccgcaggcgccgccgccaccgccgccgccgcctccgcctcaaccccctcagccgccgcctcaggggcagccgccgccgccaccaccgccgctgccaggtccggcagaggaaccgctgcaccgaccaaagaaggaactctcagccaccaagaaagaccgtgtgaatcattgtctaacaatatgtgaaaacattgtggcacagtctctcagaaattctccagaatttcagaaactcttgggcatcgctatggaactgtttctgctgtgcagtgacgatgcggagtcagatgtcagaatggtggctgatgagtgcctcaacaaagtcatcaaagctttgatggattctaatcttccaaggctacagttagaactctataaggaaattaaaaagaatggtgctcctcgaagtttgcgtgctgccctgtggaggtttgctgagctggctcacctggttcgacctcagaagtgcaggccttacctggtgaatcttcttccatgcctgacccgaacaagcaaaagaccggaggaatcagttcaggagaccttggctgcagctgttcctaaaattatggcttcttttggcaatttcgcaaatgacaatgaaattaaggttctgttgaaagctttcatagcaaatctgaagtcaagctctcccaccgtgcggcggacagcagccggctcagccgtgagcatctgccaacattctaggaggacacagtacttctacaactggctccttaatgtcctcctaggtctgctggttcccatggaagaagagcactccactctcctgatcctcggtgtgttgctcacattgaggtgtctagtgcccttgctccagcagcaggtcaaggacacaagtctaaaaggcagctttggggtgacacggaaagaaatggaagtctctccttctacagagcagcttgtccaggtttatgaactgactttgcatcatactcagcaccaagaccacaatgtggtgacaggggcactggagctcctgcagcagctcttccgtacccctccacctgaactcctgcaagcactgaccacaccaggagggcttgggcagctcactctggttcaagaagaggcccggggccgaggccgcagcgggagcatcgtggagcttttagctggagggggttcctcgtgcagccctgtcctctcaagaaagcagaaaggcaaagtgctcttaggagaggaagaagccttggaagatgactcggagtccaggtcagatgtcagcagctcagcctttgcagcctctgtgaagagtgagattggtggagagctcgctgcttcttcaggtgtttccactcctggttctgttggtcacgacatcatcactgagcagcctagatcccagcacacacttcaagcagactctgtggatttgtccggctgtgacctgaccagtgctgctactgatggggatgaggaggacatcttgagccacagctccagccagttcagtgctgtcccatccgaccctgccatggacctgaatgatgggacccaggcctcctcacccatcagtgacagttctcagaccaccactgaaggacctgattcagctgtgactccttcggacagttctgaaattgtgttagatggtgccgatagccagtatttaggcatgcagataggacagccacaggaggacgatgaggagggagctgcaggtgttctttctggtgaagtctcagatgttttcagaaactcttctctggcccttcaacaggcacacttgttggaaagaatgggccatagcaggcagccttccgacagcagtatagataagtatgtaacaagagatgaggttgctgaagccagtgatccagaaagcaagccttgccgaatcaaaggtgacataggacagcctaatgatgatgattctgctcctctggtacattgtgtccgtcttttatctgcttcctttttgttaactggtgaaaagaaagcactggttccagacagagacgtgagagtcagtgtgaaggccctggccctcagctgcattggtgcggctgtggcccttcatccagagtcgttcttcagcagactgtacaaagtacctcttaataccacggaaagtactgaggaacagtatgtttctgacatcttgaactacatcgatcatggagacccacaggtccgaggagctactgccattctctgtgggacccttgtctactccatcctcagtaggtcccgtctccgtgttggtgactggctgggcaacatcagaaccctgacaggaaatacattttctctggtggactgcattcctttactgcagaaaacgttgaaggatgaatcttctgttacttgcaagttggcttgtacagctgtgaggcactgtgtcctgagtctttgcagcagcagctacagtgacttgggattacaactgcttattgatatgctgcctctgaagaacagctcctactggctggtgaggaccgaactgctggacactctggcagagattgacttcaggctcgtgagttttttggaggcaaaagcagaaagtttacaccgaggggctcatcattatacagggtttctaaaactacaagaacgagtactcaataatgtggtcatttatttgcttggagatgaagaccccagggttcgacatgttgctgcaacatcattaacaaggcttgtcccaaagctgttttacaagtgtgaccaaggacaagctgatccagttgtggctgtagcgagggatcagagcagtgtctacctgaagctcctcatgcatgagacccagccaccatcacacttttctgtcagcaccatcaccagaatctatagaggctatagcttactgccaagtataacagatgtcaccatggaaaacaatctctcaagagttgttgccgcagtttctcatgaactcattacgtcaacaacacgggcactcacatttggatgctgtgaagccttgtgtcttctctcagcagcctttccagtttgcacttggagtttaggatggcactgtggagtgcccccactgagtgcctctgatgagtccaggaagagctgcactgttgggatggcctccatgattctcaccttgctttcatcagcttggttcccactggatctctcagcccatcaggatgccttgattttggctggaaacttgctagcagcgagtgcccccaagtctctgagaagttcatggacctctgaagaagaagccaactcagcagccaccagacaggaggaaatctggcctgctctgggggatcggactctagtgcccttggtggagcagcttttctcccacctgctgaaggtgatcaatatctgtgctcatgtcttggacgatgtgactcctggaccagcaatcaaggcagccttgccttctctaacaaaccccccttctctaagtcctattcgacggaaagggaaggagaaagaacctggagaacaagcttctactccaatgagtcccaagaaagttggtgaggccagtgcagcctctcgacaatcagacacctcaggacctgtcacagcaagtaaatcatcctcactggggagtttctaccatctcccctcctacctcaaactgcatgatgtcctgaaagccactcacgccaactataaggtcaccttagatcttcagaacagcactgaaaagtttggggggttcctgcgctctgccttggacgtcctttctcagattctagagctggcgacactgcaggacattggaaagtgtgttgaagaggtccttggatacctgaaatcctgctttagtcgagaaccaatgatggcaactgtctgtgtgcagcagctattgaagactctctttgggacaaacttagcctcacagtttgatggcttatcttccaaccccagcaagtctcagtgccgagctcagcgccttggctcttcaagtgtgaggcccggcttatatcactactgcttcatggcaccatacacgcacttcacacaggccttggctgacgcaagcctgaggaacatggtgcaggcggagcaggagcgtgatgcctcggggtggtttgatgtactccagaaagtgtctgcccaattgaagacgaacctaacaagcgtcacaaagaaccgtgcagataagaatgctattcataatcacattaggttatttgagcctcttgttataaaagcattgaagcagtacaccacgacaacatctgtacaattgcagaagcaggttttggatttgctggcacagctggttcagctacgggtcaattactgtctactggattcagaccaggtgttcatcgggtttgtgctgaagcagtttgagtacattgaagtgggccagttcagggaatcagaggcaattattccaaatatatttttcttcctggtattactgtcttatgagcgctaccattcaaaacagatcattggaattcctaaaatcatccagctgtgtgatggcatcatggccagtggaaggaaggccgttacacatgctatacctgctctgcagcccattgtccatgacctctttgtgttacgaggaacaaataaagctgatgcagggaaagagcttgagacacagaaggaggtggtggtctccatgctgttacgactcatccagtaccatcaggtgctggagatgttcatccttgtcctgcagcagtgccacaaggagaatgaggacaagtggaaacggctctctcggcaggtcgcagacatcatcctgcccatgttggccaagcagcagatgcatattgactctcatgaagcccttggagtgttaaataccttgtttgagattttggctccttcctccctacgtcctgtggacatgcttttgcggagtatgttcatcactccaagcacaatggcatctgtaagcactgtgcagctgtggatatctggaatcctcgccattctgagggttctcatttcccagtcaaccgaggacattgttctttgtcgtattcaggagctctccttctctccacacttgctctcctgtccagtgattaacaggttaaggggtggaggcggtaatgtaacactaggagaatgcagcgaagggaaacaaaagagtttgccagaagatacattctcaaggtttcttttacagctggttggtattcttctagaagacatcgttacaaaacagctcaaagtggacatgagtgaacagcagcatacgttctactgccaagagctaggcacactgctcatgtgtctgatccacatattcaaatctggaatgttccggagaatcacagcagctgccactagactcttcaccagtgatggctgtgaaggcagcttctatactctagagagcctgaatgcacgggtccgatccatggtgcccacgcacccagccctggtactgctctggtgtcagatcctacttctcatcaaccacactgaccaccggtggtgggcagaggtgcagcagacacccaagagacacagtctgtcctgcacgaagtcacttaacccccagaagtctggcgaagaggaggattctggctcggcagctcagctgggaatgtgcaatagagaaatagtgcgaagaggggcccttattctcttctgtgattatgtctgtcagaatctccatgactcagaacacttaacatggctcattgtgaatcacattcaagatctgatcagcttgtctcatgagcctccagtacaagactttattagtgccattcatcgtaattctgcagctagtggtctttttatccaggcaattcagtctcgctgtgaaaatctttcaacgccaaccactctgaagaaaacacttcagtgcttggaaggcatccatctcagccagtctggtgctgtgctcacactatatgtggacaggctcctgggcacccccttccgtgcgctggctcgcatggtcgacaccctggcctgtcgccgggtagaaatgcttttggctgcaaatttacagagcagcatggcccagttgccagaggaggaactaaacagaatccaagaacacctccagaacagtgggcttgcacaaagacaccaaaggctctattcactgctggacagattccgactctctactgtgcaggactcacttagccccttgcccccagtcacttcccacccactggatggggatgggcacacatctctggaaacagtgagtccagacaaagactggtacctccagcttgtcagatcccagtgttggaccagatcagattctgcactgctggaaggtgcagagctggtcaaccgtatccctgctgaagatatgaatgacttcatgatgagctcggagttcaacctaagccttttggctccctgtttaagccttggcatgagcgagattgctaatggccaaaagagtcccctctttgaagcagcccgtggggtgattctgaaccgggtgaccagtgttgttcagcagcttcctgctgtccatcaagtcttccagcccttcctgcctatagagcccacggcctactggaacaagttgaatgatctgcttggtgataccacatcataccagtctctgaccatacttgcccgtgccctggcacagtacctggtggtgctctccaaagtgcctgctcatttgcaccttcctcctgagaaggagggggacacggtgaagtttgtggtaatgacagttgaggccctgtcatggcatttgatccatgagcagatcccactgagtctggacctccaagccgggctagactgctgctgcctggcactacaggtgcctggcctctggggggtgctgtcctccccagagtacgtgactcatgcctgctccctcatccattgtgtgcgattcatcctggaagccattgcagtacaacctggagaccagcttctcggtcctgaaagcaggtcacatactccaagagctgtcagaaaggaggaagtagactcagatatacaaaacctcagtcatgtcacttcggcctgcgagatggtggcagacatggtggaatccctgcagtcagtgctggccttgggccacaagaggaacagcaccctgccttcatttctcacagctgtgctgaagaacattgttatcagtctggcccgactccccctagttaacagctatactcgtgtgcctcctctggtatggaaactcgggtggtcacccaagcctggaggggattttggcacagtgtttcctgagatccctgtagagttcctccaggagaaggagatcctcaaggagttcatctaccgcatcaacaccctagggtggaccaatcgtacccagttcgaagaaacttgggccaccctccttggtgtcctggtgactcagcccctggtgatggaacaggaagagagcccaccagaggaagacacagaaagaacccagatccatgtcctggctgtgcaggccatcacctctctagtgctcagtgcaatgaccgtgcctgtggctggcaatccagctgtaagctgcttggagcaacagccccggaacaagccactgaaggctctcgataccagatttggaagaaagctgagcatgatcagagggattgtagaacaagaaatccaagagatggtttcccagagagagaatactgccactcaccattctcaccaggcgtgggatcctgtcccttctctgttaccagctactacaggtgctcttatcagccatgacaagctgctgctgcagatcaacccagagcgggagccaggcaacatgagctacaagctgggccaggtgtccatacactccgtgtggctgggaaataacatcacacccctgagagaggaggaatgggatgaggaagaagaggaagaaagtgatgtccctgcaccaacgtcaccacctgtgtctccagtcaattccagaaaacaccgtgccggggttgatattcactcctgttcgcagtttctgcttgaattgtacagccgatggatcctgccatccagtgcagccagaaggacccccgtcatcctgatcagtgaagtggttcgatctcttcttgtagtgtcagacttattcaccgaacgtacccagtttgaaatgatgtatctgacgctgacagaactacggagagtgcacccttcagaagatgagatcctcattcagtacctggtgcctgccacctgtaaggcagctgctgtccttggaatggacaaaactgtggcagagccagtcagccgcctactggagagcacactgaggagcagccacctgcccagccagatcggagccctgcacggcatcctctatgtgttggagtgtgacctcttggatgacactgcaaagcagctcattccagttgttagtgactatctgctgtccaacctcaaaggaatagcccactgcgtgaacattcacagccagcagcatgtgctggtaatgtgtgccactgctttctacctgatggaaaactaccctctggatgtgggaccagaattttcagcatctgtgatacagatgtgtggagtaatgctgtctggaagtgaggagtccaccccctccatcatttaccactgtgccctccggggtctggagcggctcctgctgtctgagcagctatctcggctagacacagagtccttggtcaagctaagtgtggacagagtgaatgtacaaagcccacacagggccatggcagccctaggcctgatgctcacctgcatgtacacaggaaaggaaaaagccagtccaggcagagcttctgaccccagccctgctacacctgacagcgagtctgtgattgtagctatggagcgagtgtctgttctctttgataggatccgcaagggatttccctgtgaagccagggttgtggcaaggatcctgcctcagttcctagatgacttctttccacctcaagatgtcatgaacaaagtcattggagagttcctgtccaatcagcagccatacccacagttcatggccactgtagtttacaaggtttttcagactctgcacagtgctgggcagtcatccatggtccgggactgggtcatgctgtccctgtccaacttcacacaaagaactccagttgccatggccatgtggagcctctcctgcttccttgttagcgcatctaccagcccatgggtttctgcgatccttccacatgtcatcagcaggatgggcaaactggaacaggtggatgtgaaccttttctgcctggttgccacagacttctacagacaccagatagaggaggaattcgaccgcagggctttccagtctgtgtttgaggtggtggctgcaccaggaagtccataccacaggctgcttgcttgtttgcaaaatgttcacaaggtcaccacctgctgagtagtgcctgtgggacaaaaggctgaaagaaggcagctgctggggcctgagcctccaggagcctgctccaagcttctgctggggctgccttggccgtgcaggcttccacttgtgtcaagtggacagccaggcaatggcaggagtgctttgcaatgagggctatgcagggaacatgcactatgttggggttgagcctgagtcctgggtcctggcctcgctgcagctggtgacagtgctaggttgaccaggtgtttgtctttttcctagtgttcccctggccatagtcgccaggttgcagctgccctggtatgtggatcagaagtcctagctcttgccagatggttctgagcccgcctgctccactgggctggagagctccctcccacatttacccagtaggcatacctgccacaccagtgtctggacacaaaatgaatggtgtgtggggctgggaactggggctgccaggtgtccagcaccattttcctttctgtgttttcttctcaggagttaaaatttaattatatcagtaaagagattaattttaatgtaacttttcctatgcccgtgtaaagtgtgtgacttggcaaggcctgtgctgcatgtgacaaagtttatggaagtggaggggccttctggccgccactccctctcctgtagctactcagtctagtcgggcaggtccctcctgtagccctcccaacaccctgtggcacttgcacttcatacagctcccttttcttatgcattccattaagccagcacagagagaggtgttggtattgactgcctgtgtgagaatcctgcctgtggcctaactgaggaactgaaaaactgacttccactgttagagttataagaggcttgccctgtggcagctgccctcctctccccttcccaggcatgactgtcaagctatctcctccctggtgttgatgcactctcctagtctctcagcctgggtagaaacagcatctgctggacccaaagtggctatcccaataacctcatccctggttgtggctgacctgcactgtagcctgcccacacaccagctgaccattgtggatgctgtctgtccctttgtatcttctgcatggttgggacctgagaagtgctgacctgattaccccaaaggtgtctctgagctatggtttgttggtttgtctcagtttctcatagtcaagggaaagcttggtgtcctagcaacagttaagaatggacccagagcctcttttgccccttcccatcttgccttctgtcagcccagtagagtacagacctatgcctgtcagagcccagggaggactcagctgacaagatgaggcaccaaagggaaggttcaaaatcaggtcagcctctggcctcagacagcttcccatgctggtcagagccacctcttcccaaagcccaagcccagagtaaccaggtcatgttaatgaaaatgagctaccttcatttcctggcttggtttgggaactctgtttgctgtttgactatatgaccaagcagattttctgctgttccgctaagtcatatctgtatttctcagctgtagagtaggggagtggaatagtttggagatgtttctaggctacacaggaggaaagagcttgcagcctgtgattaactaactgtgcttcagtccatggattgctttcttgagacccttgaatttccctctatctttccatcatgacaagtagccttgctgctgggatgcaaggttccctaccaaacacaggttgtggggagcctcacacttggcctgactctcctcctatctgccctggcaaaaaccaccccaaggcgtggtaacaggaacagtggacatggattaggtctttcaagaggacgttaagggaagctactgaattttaatgaaagaaattcaccaatgcccctttgctgatttagggcttcttcttgtcaccctcaatttcccgcctagaagtgctcggggaccatgtgaaagttcttacagtgctgctgccacactctgaggttggtccaaccgctctgagatgagcatggtgcaggcctgattactcctcatggtagatgttcataaggaaactcaatataaaatctagagccattcaccaggggattatatcagtgagctcaacctcaagtttagttggcctcttgtttagtgtgatcagaaacaattcttagtatggggcaaggacagcctctgccacaaagttgttgtctgctcatgggtgccacaacctagagatgcacctgggtacaggcaggtatgtatttgtgtacacacataaacacacacacaatcctcaaagacatatgcaaggcctctaaaaatgcctgcctgttttttctgaaagcagacttttcttgcaactgccacatacagtcagctttgtgagtctagcatctgagaatgggactcaatttttaaaagtccatagctcattaaagtctcactggagacattgccccacctgtctaactgcaggagggactaaaactttttatcaaattcctcaaaaatctaaagatttccaagctttatttaaaaacaaaagttattttgactatgaggttttaggggtaggaggtgggatgttgtttctgtttccatggtggtactgtcaggaaagattttaataaaaccagggtagaacttttggcaatgcacttcagcatgtttcttctccaaaatgtgcctccctccctcccactgatggcccccttgacatgtaggtgacttagccactgccaagtgccctttatggttctctcattttgtctgcacatgtacccttcaggagggaagaactggagtggaaccacctcctgccctgtagaatgcagtgccagggaagggaccaatcctaacaggtgccttccctggcaggaagtaccttcccgtgagtgagtgaagcagctctgcttccggctcatgggacaggttttatacagcaatagcttgtctcacagccacgtcacaaggagtcttgcctcccattgtggggctgcagaattggtctccttgccacctgtgagcatccttccccacacagtctccttccctccctccttccctccctccctccctccctccctccgtccctccctccctccctcagcattgagcactaggatcatggctgctaccaggacaggcatgaagctgtcctccagggattggtatgtgggagtcgaagacactgagctgctgatgctgggtgtgggctcaggatatcatggttgggaaaagaattgttcctcagtgggtctggagcctccaggaaagaagaaccaatgctgagcagtgtgacaactaaagatgatatcaaggttcagggccaccctccatgtgtgcttgtcacactctagagccatcgaaggaactgctcccctcaagtgtctctggaaacaccctctgccgcaagctgggtgtaagataataggtggcagagacctatctgcagagatttggctgcattctagggggctcctgtccaagccttgctgctgtatgccatgggcttcactgggaactaggagggctgtgatgggtgtgccccggagcccagcctagacctggctgtccatttccaaaaggaaggactgacatgaaatgtatatttaaaatttttaaattgcagatattgtacagttgaattaaagaagcgattaaaccacctgttgttgctgttaaaaaaaaaaaaaaaaaa

SEQ ID NO: 3 - DNA, 13189 bp, Rattus norvegicus
  source 1..13189: mol_type = genomic DNA
gcactcgccgcgagggttgccgggacgggcccaagatggctgggagctttggttccgcttcggtctacctcgtagagccccattcattaccttgctgctaagtggcgctgcgtagtgcgaataggctccaagccttcagggtctgtcctgtcgggcaggaggccgtcatggcaaccctggaaaaactgatgaaggctttcgagtcgctcaagtcgttccagcagcaacagcagcagcagcagccgccgccgcaggcgccgccaccaccgccgccgccgccgcctcaaccccctcagccgccgcctcaggggcagccgccgccaccaccgccgctgccaggtccggccgaggagccgctgcaccgaccaaagaaggaactctcagccaccaagaaggaccgtgtgaatcactgtctaacaatatgtgaaaacattgtggcacagtctctcagaaattctccagaatttcagaaactcttgggcattgctatggaactgtttctgctgtgcagcgacgatgcggagtcagacgtcagaatggtggctgatgagtgcctcaacaaagtcatcaaagctttgatggactctaatcttccaaggctacagttagaactctataaggaaattaaaaagaatggtgctcctcgaagtttgcgtgcagctctgtggaggtttgctgagctggctcacctggttcgacctcagaagtgcaggccttatctggtgaatcttcttccatgtttgacccgaacaagcaaacgaccggaggagtcagttcaggagactttggctgcagctgttcctaaaattatggcctcttttggcaatttcgcgaatgacaatgaaattaaggttctattgaaagctttcatagcaaatctgaagtcaagctctcccactgtgcggcggacagcagctgggtcagcagtgagtatctgccagcactctaggaggacacagtacttctacaactggctcctgaatgtgctcctaggtttgctggttcccatggaggaagaccaccccactctcctgatccttggtgtgttgctcacactgaggtgtctagtgcccttgctccagcagcaggtcaaggacacaagtctaaagggcagctttggggtaacacggaaagaaatggaagtctctccttctgcagagcagcttgtccaggtttatgaactgactttgcatcacacacagcaccaagaccataatgtggtgacaggggcattggagctcctgcagcagctcttccgtacccctccacctgagctgctgcaagcactgaccacaccaggagggctcgggcagctcactctggttcgagaggaagccgggggccgaggccgcagcgggagtatcgtggagcttttagctggagggggttcctcatgcagccctgttctctcaagaaagcaaaaaggcaaagtgctcttaggagaggaagaagccttggaggatgactcggagtccaggtcagatgtcagcagctcagcctttgcagcctctgtgaagagtgagattggtggagagctcgctgcttcttcttcgggtgtctccactcccggttctgtaggtcacgacatcatcactgagcagcctcgatcccagcacacacttcaagcagactctgtggatttgtcaggctgtgacttgaccagtgctgctactgatggagatgaggaagacatcttgagccacagctccagccagttcagtgctgttccatccgaccctgccatggacctgaatgatgggacccaggcctcctcacccatcagtgacagttctcagaccaccactgaaggacctgattcagctgtgactccttctgacagttctgaaattgtcttagatggtgctgacagccagtatttaggcgtgcagataggacagccacaggaggaagacgaggaggaagctgcaggtgttctttctggtgaagtctcagacgttttcagaaactcttctctggcccttcagcaggcacacttgttggaaagaatgggtcatagccggcagccttctgacagcagtgttgataagtttgtttcaaaagatgaggttgctgaagctggggacccagaaagcaagccttgccgaatcaaaggtgacataggacagcctaatgatgatgattctgctcctctggtacattgtgtccgtcttttatccgcttcctttttgttaactggcgaaaagaaagcactggttccagacagagatgtgagagtcagtgtgaaggccctggccctcagctgtattggtgcagctgtggcccttcatccagagtcgttcttcagcaaactctacaaagtacctctcagtaccatggaaagtactgaggaacagtatgtctctgacatcctgaactacatcgatcatggagaccctcaggtgcgaggagctactgccattctctgtgggacccttgtctactccatcctcagcaggtcccgtctccgtgttggtgactggctgggcaccatcagggccctgacaggaaatacattttctctggtggactgcattcctttactgcagaaaactttgaaggatgaatcttctgttacttgcaagttggcttgtacagctgtgaggcactgtgtcctgagtctttgcagcagcagctacagtgacttgggattacaactgcttattgacatgctgcctctgaagaacagctcctactggctggtgaggactgaactgctggaaactcttgcagagattgatttcaggctggtgagttttttggaggcaaaagcagaaagtttacaccgaggggctcatcattatacagggtttctaaaactacaagaacgagtactcaataatgtggtcatttatttgcttggagatgaagaccccagggttcgacatgttgctgcgacgacattgacaagacttgtcccaaagctgttttataagtgtgaccaaggacaggctgacccagtcgtggctgtagcaagagatcaaagtagtgtttacctgaagctcctcatgcatgagacccagccaccatcccacttctccgtcagcaccataaccagaatctatagaggctacagcttactaccaagtgtaacagatgtcaccatggaaaacaacctctcaagagtcgttgccgcagtttctcatgaactcattacgtcaactacacgggcactcacatttgggtgctgtgaagccttgtgtgttctttcagccgcctttccagtttgcacttggagtctaggatggcactgtggagtgcccccactgagtgcctctgatgagtccaggaagagctgcactgttgggatggcctccatgattctcaccttgctttcatcagcttggttcccactggatctctcagcccatcaggatgccttgattttggctggaaacttgctagcagcgagtgcccccaagtctctgagaagctcatgggcctcggaagaagaaggcagctcagcagccaccagacaggaggagatctggcctgccctgggggatcggactctggtgcccatggtggagcagcttttctcccacctgctgaaggtgatcaatatctgtgctcatgtcttggatgacgtgactcctggaccagcaatcaaggcagctttgccttctctcacaaaccccccttctctaagtcctattcgacggaaagggaaggagaaagagcccggagaacaaacatccactccgatgagtcccaagaaaggtggagaggccagtacagcctctcgacagtcagacacctcaggacctgtcacagcgagtaaatcatcttcacttgggagtttctaccatctcccttcctacctcagactgcatgatgtcctgaaagccactcacgccaactataaggtcaccttagatcttcagaacagcactgaaaagtttggggggttcctgcgctctgccttggacgtcctttctcagattctagagctggcgacactgcaggacattggaaagtgtgttgaagaggtccttggatacttgaaatcctgctttagtcgagaaccaatgatggcgactgtctgtgttcagcagctattgaagactctctttgggacaaacttagcctcacagtttgatggcttatcttccaaccccagcaagtctcagtgccgagcacagcgccttggctcttccagtgtgaggcccggcttatatcactactgcttcatggcaccatacacgcacttcacgcaggctttggctgatgccagcctgaggaacatggtacaggcggaccaggagcacgatgcctcagggtggtttgatgtactccagaaagtgtctgctcagttgaagacgaaccttacaagtgtcacaaagaaccgtgcagataagaacgctattcataaccacattaggttatttgagcctcttgttataaaagcattgaagcagtacaccacgacaacatcagtacaactgcagaagcaggttttggatttgctggcacagctggttcagctacgggtcaattactgtctactggattcagatcaggtgttcatcgggtttgtgctgaagcagtttgagtacattgaagtgggccagttcagggaatcagaggcaattattccaaatatatttttcttcctggtactattatcttatgagcgctaccattcaaaacagatcattggaattcctaaaatcatccagctgtgtgatggcatcatggccagtggaaggaaggctgtcacacatgctattcctgcgctgcagcccattgtccatgacctctttgtgttaagaggaacaaataaagctgatgcagggaaagagcttgaaacccagaaggaggtggtggtctcaatgctgttacgactcatccagtaccatcaggtgctagagatgttcatcctcgtcctgcagcagtgccacaaagagaatgaggacaagtggaaacggctctctcggcaggtcgcagacatcatcctgcccatgttagccaagcagcagatgcatattgactctcatgaagcccttggagtattaaataccttgtttgagattttggctccttcctccctacgtcctgtggacatgcttttgcggagtatgttcatcactccaagcacaatggcatctgtaagcactgtgcagctgtggatatctggaatcctagccattctgagggttctcatttcccagtcaaccgaagacattgttctttctcgtattcaggagctctccttctctccatatttaatttcctgtccagtaattaacaggttaagggatggagacagtaatccaacactaggagaacgcagtgaagggaaacaagtaaagaatttgccagaagatacattctcaaggtttctcttacagctggttggtattcttctggaagacattgttacaaaacagctcaaagtggacatgagtgaacagcagcatacattctattgccaagagctcggcacactgctcatgtgtctgatccacatattcaaatctggaatgttccggagaatcacagccgctgccactagactcttcaccagtgatggctgtgaaggcagcttctatactctagatagcctgaatgcacgggtgcgagccatggtgcccacacacccagctctggtactgctctggtgtcagatcctactgctcatcaaccacactgaccaccgatggtgggccgaggtgcagcagacgcccaagagacacagtctgtcctgcacgaagtcactaaacccccagatatctgctgaagaggattctggctcagcagctcagcttggaatgtgcaatagagaaatagtacgaagaggggcccttattctcttctgtgattatgtctgtcagaatctccatgactcagaacacttaacatggctcattgtgaatcacattcaagatctgatcagcttgtcccacgagcctccagttcaagactttattagtgccattcatcgtaattctgcagctagtggtctttttatccaggcaattcagtctcgctgtgaaaatctttcaactccaaccactctgaagaaaacacttcagtgcttggaaggcatccatctcagccagtctggtgctgtgctcacactgtatgtggacaggctactgggcacccctttccgtgcgctggctcgcatggtcgacaccctggcctgtcgccgagtagaaatgcttttggctgcaaatttacagagcagcatggcccagttgccagaggaggaactgaacagaatccaggaacacctccagaacactgggcttgcacaaagacaccaaaggctctattcactgctggacagattccgactctctactgtgcaggactcacttagccccttgcccccagtcacttcccaccctctggatggggatgggcacacatccctggaaacagtgaatccggacaaagactggtacctccagcttgtcagatcccagtgttggaccaggtcagattctgcactgctggaaggtgcagagctggtgaaccgtatccctgctgaagatatgagtgacttcatgatgagctcggagttcaacctaagccttttggctccctgcttaagccttggcatgagcgagattgctaatggccaaaagagtcccctttttgaagcggctcgtagggtgactctggaccgggtgaccaatgtggttcagcagctgcctgcagtccatcaagtcttccagcctttcctgcctacagaacccacagcctactggagcaagctgaatgatctctttggtgataccacatcataccagtctctgaccacacttgcccgtgccctggcacagtacctggtggtgctctccaaagtgcctgctcctttgcaccttcctcctgagaaggaggggcacacggtgaagtttgtggtaatgacacttgaggccctgtcatggcatttgatccatgagcagatcccactgagtctggacctccaagccggcctagactgctgctgcctggcactgcaggtgcctggcctctggggggtgctgtcctccccagagtacgtgactcatacttgctcccttatccactgtgtgcgattcatcctggaagccattgcagtacaacctggagaccaacttcttggtccggaaagcaggtcacatactccaagggctgtcagaaaggaggaagtagactcagatatacaaaacctcagtcacatcacttcggcctgcgagatggtggcagacatggtggaatccctgcagtcggtgctggccctgggccacaagaggaacagcaccctaccttcatttctcacagctgtgctgaagaacattgttgtcagtctggcccgcctccccctcgttaacagctatactcgtgtgcctcctctggtatggaaactcgggtggtcacccaagcctggaggggatttcggcacagtgtttcctgagatccctgtagagttcctccaggagaaggaggtcctcaaggagttcatctaccgcatcaacaccctagggtggaccagtcgtactcaattcgaagaaacttgggccaccctccttggtgtcctggtgactcagcccttggtgatggaacaggaagagagcccaccagaggaagacaccgaaaggacccagatccacgtcctggctgtacaggccatcacctctctagtgctcagcgcaatggctgtgcctgtggctggcaatccagctgtaagctgcttggagcaacagccccggaacaagccactgaaggctctcgataccagatttggaagaaagttgagcatgatcagagggattgtagaacaagaaatccaagagatggtttcccaaagagagaatactgccactcatcattctcaccaggcatgggatcctgtcccttctctgttaccagctactacaggtgctcttatcagccatgacaagctgctgctgcagatcaactcagagcgggagccaggcaacatgagctacaagctgggccaggtgtccatacactccgtgtggctggggaacaacatcacacccctgagagaggaggaatgggatgaggaggaggaggaagaagcggatgcccctgcgccaacatcaccacctgtgtctccagtcaattccagaaaacaccgtgctggggttgatattcactcctgttcgcagtttctgcttgaattatacagccgttggatcctgccatccagtgcagccagaaggacccctgtcatcctgatcagtgaagtggttcgatctcttcttgtggtgtcagacttattcactgaacgtacccagtttgaaatgatgtatctgacgctgacagaactacggagagtgcacccttcagaagatgagatcctcattcaatacctggtgcctgccacctgtaaggcagctgctgttcttggaatggacaaaactgtggcagagccggtcagccgcctactggagagcacactcaggagcacccacctgcccagccagatcggagccctgcatggcatcctctatgtgttggagtgtgacctcttggatgacactgtaaagcagctcattccagttgttagtgactatctgctgtccaacctcaaaggaatagcccactgcgtgaacattcacagccagcagcatgtgctggtgatgtgtgccactgcattctacctgatggaaaactaccctctggatgtggggccagaattctcagcatctgtgatacagatgtgtggagtaatgctgtctggaagtgaggagtccaccccctccatcatttaccactgtgccctccggggtctggaacggctcctgctgtctgagcagctctctcggctagacacggagtccttggtcaagctaagtgtggacagagtgaatgtacaaagcccacacagggccatggcagccctaggcctgatgcttacctgcatgtacacaggaaaggaaaaagccagtccaggcagagcttctgaccccagccctgctacccctgacagcgagtctgtgattgtagctatggagcgagtgtctgtgctctttgacaggatccgcaagggatttccctgtgaagccagggtcgtggcaaggatcctgcctcagtttctagatgacttctttccacctcaagatgtcatgaacaaagtcattggagagttcctgtccaaccagcagccatacccacagttcatggccactgtagtatacaaggtttttcagactctgcacagtgctgggcagtcatccatggtccgggactgggttatgctgtctctgtccaacttcacacaaagaactccagttgccatggccatgtggagcctctcctgcttccttgtcagtgcatctaccagcccatgggtttctgcaatccttccacacgtcatcagcaggatgggcaaactggagcaggtggatgtgaaccttttctgcctggttgccacagacttctacagacaccagatagaggaggaattcgaccgcagggctttccagtctgtgtttgaggtggtggcagcaccaggaagtccataccacaggctgcttgcttgtttgcaaaatgttcacaaggtcaccgcctgctgagtagtacctgtggaacaagaggctgagaggaggcaactgctgtggctacagcctccaggggcctgcaccaagcttctgctaaggctgccttggacgtgcaggcttccacttgtgtcaagtggacagccaggcaatggcaggagtgctttgcaatgagagctatgcagggaacatgcactatgttggggttgagcctgagtcctgggtcctggcatcactgcagctggtggcagtgctaggttgaccaggtgtttgtctttttcttagtgttgccctggccatagttgccaggttgcagctgccctggtatgtggaacagaatccgagctcttgtaagatggttctgagcccccctgtcccactgggctggagagctccctcccacatttacccagcaggtgtacctgccacaccagtgtctggacacaaagtgaatggtgtgggggctgggaactgggactgccaggtgtccagcatcattttccctttctctgttttcttctcaggagttaaaatttaattatatcagtaaagagattaattttaatgtaactcttcctatgcccgtgtaaagtgtgtgacttggcaaggcctgtgctgcatgtgacaaagtttatggaagtggatgcgccttctggccaccactctctctcctgtagctactcagtctagtcgggcaggtccctcatgtagccctcccaacaccctatggcacttgcacttcacacggctcctttttcttatgcattccatttgactagcacagagtggtgttggtgttaactgccctatgtgagaatcctgcttgtggcccagcttatgagactgacttccacttaggattaagagaggcttgccctgcggcagacccccacccctaccccaggcatgactatcaagctgtctactcactagtgttgatgcactctcctagtctctcagcctgggcagagacagcatctgctggacccaaagaggctatttcaataatctcatccctggtcgtggctgacctgggctgtagcctgcccagacaccggctgaccattgtggatgctctctgtccctttgtatcttctgcatggttgggacctgaggaatgctagcccgatcaccccaaaggtgtctctgagctatggcttgttggttgtctccgtttctcttggtcaagggaaagctcaatgtcctagcaacaattaagaatggaaccagagcctcttttgccccttcccatcttgccttctgtcagcccttacagtacagacctatgcctttcagagccaagggaggactcggcctgacaagatgaggcaccaaagggaaggttcaaaatcaggtcagcctatggcctcagacagcttcccgtgctgctggtcagagccgcctcttcccaaggcccaagcccagagtagccaggacatgttgatgagaatgagccctggacacaggctgccttcgtcccctggcttggtccaggagctctgctggctgtgtgactgagcgggctctctgctgcccactcagtcctgtctgtaccaatcgactgcagagtggggagaggagtaatttggagctgtttctaggctacacgggaggaaagagcttgcagcctatgactaattaactgtgcttcagtctgtggactgctttcttaagaatttccttctgttttcccatcatgatgattaaaaggctgccgggatgcaaggttccctaccaaacacaggtacacaggttgtggggagcctcacacttggcctgattctattcctatctgccctggcaaaggccactgcaagccagcccagcccatcctggtgtcatggtaacaggaacagtggacatggatcaggtctttcaagaggaccttaaaggaagctactgaattttaatgaaagaaagtcaccaatgcccctttgctgatttagggtttctacttgttaccctagatatccctcctagaagtgcttggagaccacatgaaagttctcacaatgctgctgccacactctaaagttggtccaacagctctgagatgagcatgttgcaggcctgattaccgattactcctcatggtagatgttcataagaaaacagaatataaaatctagagccattcacctggggtttatatcagtgacttccagtttagttggtctcttgttcagtgtggtcagaaataactcttagtatgggacaagaacagcctctgctacaaagctgttgtctgctcatgggtgctgcaacctagagatgcacctgggcacaggcacacacgcacacacgcacacacacacacacacacacacacacacacctcaaagacatatgcaagacctctaaaaatgcctgtccattcttcctgaaagcagacttttcttgtaactgccacatacagtcagctttgtgagtctagcatctgagaatgggactcaatttttaaaagtccatagtcattaaagtcccactgaagacattgccccacctgtctaactgtaggaagaactaaaactttttatcaaattcctcaaaaatctatggatttccaaactttatttaaaaaaaaaaaagtaattttgactgtgaggttttgggggtaggaggtgggatgttgtttctgttttcctgctggtattatcaggaaagattttagtaaaaccagggtagaactatttggcaatgcacttaagtatgtttcttctccaaaatgtgcctccctcccactgatggccccttgacattaggtgactttgccactgccaagtgccctttactattctctcattttgtctgcacatgtacccttcaggagggaaggactagagtggaaccacctcctgccctgtagactgcggtgccagggaaggcactgaccctaacgggtgccctccctggcaggaagtaccttcctgtgagtgaggcagctctgctttcagctcatgggacagggtttatacagcaatagcttggctcacagccacctggcaaggagtcctgcctcccattgtagggctgcagaattagtctcctcctgcctctcgtgagcatccttccccactgcctgcctgcctccctccctccctccctccctcaacggtgagcactaggatcatggctgctgccaggacaggcacgaagctgtcttccagggattggtatgtgggagtagaagaccctgagagctgctgaggctgggtgggggctcaggatatcacggtttggaagagaactgttcctcagtgggtctggagcctccaggaaagaagaaccaatgccgagcagtgtgacaactgaagatgacatgaaggttcagggccacctccatgtgtgcttgtcacactttagagccatcgaaggaactgctcccctcaagtgtccggaaacaccctctgccacaagctgggtgtaaggtgacagacacctatctgcagagatttgcctgcattctagggggctcctgtccaggccttgctgctgtatgccatgggcttcactgggaactaggagggctgtgatgggtatgccccggagcccagcctagacctggccgtccatttccaagaggaaggactgacatgaaatgtatatttaaaatttttaaattgcagatattgtacatttgaattaaagaagcaattaaactacccgttgttgctgtt

SEQ ID NO: 4 - DNA, 13328 bp, Macaca fascicularis
  source 1..13328: mol_type = genomic DNA
aggcgccgcgggggctgccgggacgggtccaagatggacggccgcttcggttccgcttttacccgcggcccagagccccattcattgccccggtgctgagcggcgctgcgagtcggcccgaggcctccggggactgcccagccgggcgggagaccgccatggcgaccctggaaaagctgatgaaggccttcgagtctctcaagtccttccagcagcagcagcagcagcagccacccggcccggctgtggctgaggagccgctgcaccgaccaaagaaagaactttcagctaccaagaaagaccgtgtgaatcattgtctgacaatatgtgaaaacatagtggcacagtctgtcagaaattctccagaatttcagaaacttctgggcatcgctatggaactttttctgctgtgcagtgatgacgcagagtcggatgtcagaatggtggctgatgaatgcctcaacaaagttatcaaagctttgatggattctaatcttccaaggttacagctcgagctctataaagaaattaaaaagaatggtgcccctcggagtttgcgtgctgccctgtggaggtttgccgagctggctcacctggttcggcctcagaaatgcaggccttacctggtgaaccttctgccgtgcctaagtcgaacaagcaagagacccgaggaatcagtccaggagaccttggctgcagctgttcccaaaattatggcttctttcggcaattttgcaaatgacaatgaaattaaggttttgttaaaggccttcatagcgaacctgaagtcaagctcccccaccattcggcggacagctgctggatcagcagtgagcatctgccagcactcaagaaggacacagtatttctatagctggctactaaatgtgctcttaggcttactggttcctgtcgaggaggagcactccaccctgctgattcttggcgtgctgctcaccctgaggtatttggtgcccttgctgcagcagcaggtcaaggatacaagcctgaaaggcagcttcggagtgacacggaaagaaatggaggtctgtccttctgcggagcagcttgtccaggtttatgaactgacgttacatcatacacagcaccaagaccacaatgttgtgaccggagccctggagctgttgcagcagctcttcagaacgcctccccccgagcttctgcaagccctgaccacagtggggggcattgggcagctcaccgccgctaaggaggagtctggtggccgaagccgtagtgggagtattgtggaacttatagctggagggggttcctcatgcagccctgtcctttcaagaaaacaaaaaggcaaagtgctcttaggagaagaagaagccttggaggatgactctgaatcgagatcggatgtcagcagctctgcctttgcagcctcagtgaaggatgatatcagtggagagctggctacttcttcaggggtttccactccagggtcagcaggtcacgacatcatcacggagcagccacggtcacagcacacgctgcaggcggactcagtggatctggccagctgtgacttgacaagctctgccacggatggggatgaggaggatatcttgagccacagctccagccaggtcagcgccgtcccatctgaccctgccatggacctgaatgatgggacccaggcctcctcgcccatcagcgacagctcccagaccaccaccgaagggcctgattcagctgtcaccccttcagacagttctgaaattgtgttagacggtaccgacaaccagtatttgggcctgcagattggacagccccaggatgaagatgaggaagccacaggtgttcttcctgacgaagcctcggaggccttcaggaactcttccatggcccttcaacaagcacatttattgaaaaacatgagtcacagcaggcagccttctgacagcagtgttgataaatttgtgttgagagatgaagctactgaaccgggtgatcaagaaaacaagccttgccgcatcaaaggtgacatcggacagtccactgatgatgattctgcacctcttgtccattgtgtccgccttttatctgcttcgtttttgctaacagggggaaaaaatgtgctggttccggaccgggatgtgagggtcagcgtgaaggccctggccctcagctgtgtgggagcagctgtggctctccacccagaatctttcttcagcaaactctataaagttcctcttgacaccacagaataccctgaggaacaatatgtctcagatatcttgaactacatcgatcatggagacccacaggttcgaggagccactgccattctctgtgggaccctcatctgctccatcctcagcaggtcccgcttccacgtgggagattggatgggcgccattagaaccctgacaggaaacacattttctttggcggattgcattcctttgctgcggaaaacactgaaggacgagtcttctgtcacttgcaagctggcttgtacagctgtgaggcattgtgtcatgagtctctgcagcagcagctacagtgagttaggactgcagctgatcatcgacgtgctgactctgaggaacagttcctattggctggtgaggacagagcttctggaaacccttgcggagattgacttcaggctggtgagctttttggaggcaaaagcagaaaacttacacagaggggctcatcattatacagggcttttaaagctgcaagaacgagtgctcaataatgttgtcatccatttgcttggggatgaagaccccagggtgcgacatgttgctgcagcatcattaattaggcttgtcccaaagctgttttataaatgtgaccaaggacaagctgacccagtagtggccgtggcaagagatcaaagcagtgtttacctgaaacttctcatgcatgagacgcagcctccatctcatttctccgtcagcacaataaccagaatatacagaggctataacctactaccaagcataacagatgtcactatggaaaataacctttcaagagttattgcagcagtttctcatgaactgatcacatcaaccacgagagcactcacttttggatgctgtgaagctttgtgtcttctttccactgccttcccagtttgcatttggagtttaggttggcactgtggagtgcctccactgagcgcctccgatgagtctaggaagagctgtaccgttgggatggccacgatgattctgaccctgctctcgtcagcttggttcccattggatctctcagcccatcaagatgctttgattttggccggaaacttgcttgcagccagtgctcctaaatctctgagaagttcatgggcctctgaagaagaagccaacccagcagccaccaagcaagaggaggtctggccagccctaggggaccgggccttggtgcccatggtggagcagctcttctcccacctgctgaaggtgatcaacatttgtgcacatgtcctggacgacgtggctcctggaccggcaataaaggcagccttgccttctctaacaaaccccccttctctaagtcccatccgacgaaaggggaaggagaaagaaccaggagaacaagcatctgtaccgttgagtcccaagaaaggcagtgaggccagtgcagcttctagacaatctgatacctcaggtcctgttacaacaagtaaatcctcatcactggggagtttctatcatcttccttcatacctcaaactgcatgatgtcctgaaagctacgcacgctaactacaaggtcaccttggatcttcagaacagcacggaaaaatttggagggtttcttcgctcagccttggacgttctctctcagattctagagctggccacactgcaggacattgggaagtgtgttgaggagatcctaggatacctgaaatcctgctttagtcgagaaccaatgatggcaactgtttgtgttcaacaattgttgaagactctctttgggacaaacttggcctcccagtttgacggcttatcatccaaccccagcaagtcacaaggccgagcacagcgccttggctcctccagtgtgaggccaggcttgtaccactactgcttcatggccccgtacacccacttcacccaggccctcgctgacgccagcttgaggaacatggtgcaggcggagcaggagcacgacacctcgggatggtttgatgtcctccagaaagtgtctacccagttgaagacgaacctcacaagtgtcacaaagaaccgtgcagataagaatgctattcataatcacattcgtttgtttgaacctcttgttataaaagctttaaaacagtacacgacaacaacatctgtgcagttacagaagcaggttttagatttgctggcgcagctggttcagttacgggttaattactgtcttctggattcagatcaggtgtttattggctttgtattgaaacagttcgaatacattgaagtgggccagttcagggaatcagaggcaatcattccaaacatctttttcttcttggtattactgtcttatgaacgctatcattcaaaacagatcattggaattcctaaaatcattcagctctgtgatggcatcatggccagtggaaggaaggctgtgacacacgccataccggctctgcagcccatagtccatgacctttttgtattaagaggaacaaataaagctgatgcaggaaaagagcttgaaacccaaaaagaagtggtggtatcaatgttactgagactcatccagtaccatcaggtgttggagatgttcattctcgtcctgcagcagtgccacaaggagaatgaagacaagtggaagcgactgtctcgacagatagctgacatcatcctcccaatgttagccaaacagcagatgcacattgactctcatgaagcccttggagtgttaaatacattatttgagattttggccccttcctccctccgtccggtggacatgcttttacggagtatgttcgtcactccaaacacaatggcatctgtgagcactgttcaactgtggatatcaggaattctggccattttgagggttctgatttcccagtcaactgaagatattgttctttctcgtattcaggagctctctttctctccatatttaatctcctgtccagtaattaataggctaagagatggggacagtaattcagcactagaagaacacagtgaagggaaacaaataaagaatttgccggaagaaacattttcaaggtttctattacaactggtgggtattcttttagaagacattgttacaaaacagctgaaggtggaaatgagtgagcagcaacatactttctattgccaagaactaggcactctgctaatgtgtctgatccacatcttcaagtctggaatgttccggagaatcacagcagctgccactagactgttccgcagtgatggctgtggcggcagtttctacaccctggacagcttgaatttgcgggctcgttccatgatcaccacccacccggccctggtgctgctctggtgtcagatcctgctgcttgtcaaccacaccgactaccgctggtgggcagaagtgcagcagaccccgaaaagacacagtctgtccagcacaaagttacttagtccccagatgtctggagaagaggaggattctgacttggcagccaaacttggaatgtgcaatagagaaatagtacgaagaggggctctcattctcttctgtgattatgtctgtcagaacctccatgactccgagcacttaacgtggctcattgtaaatcacattcaagatctgatcagcctttcccacgagcctccagtacaggacttcatcagtgctgttcatcggaactccgctgccagcggcctcttcatccaggcaattcagtctcgttgtgaaaacctttcaactccaaccactctgaagaaaactcttcagtgcttggaggggatccatctcagccagtcgggagctgtgctcacgttgtatgtggacaggctgctgtgcacccctttccgtgtgctggctcgcatggtcgacatccttgcttgtcgccgggtagaaatgcttctggctgcaaatttacagagcagcatggcccagttgccaatggaagaactcaacagaatccaggaataccttcagagcagcgggctcgctcagagacaccagaggctctattccctgctggacaggtttcgtctctccaccatgcaagactcacttagtccctctcccccagtctcttcccacccgctggacggggacgggcacgtgtcactggaaacagtgagtccggacaaagactggtacattcatcttgtcaaatcccagtgttggaccaggtcagattctgcgctgctggaaggtgcagagctggtgaatcggattcctgctgaagatatgagtgccttcatgatgaactcggagttcaacctaagcctgctagctccatgcttaagcctagggatgagtgaaatttctggtggccagaggagtccgctttttgaagcagcccgtgaggtgactctggcccgcgtgagcagcaccgtgcagcagctccctgctgtccaccacgtcttccagtccgacctgcctgcagagccggcggcctactggagcaagttgaatgatctatttggggatgctgcgctgtatcagtccctgaccactctggcccgggccctggcacagtacctggtggcggtctccaaactgcccagtcacttgcaccttcctcctgagaaagagaaggacaccatgaaattcgtggtggcaacccttgaggccctgtcctggcatttgatccatgagcagattccgctgagtctggatctccaggcagggctggactgctgctgcctggccctgcagctgcctggcctctggagcgtggtctcctccgcagagtttgtgacccacgcctgctccctcatccactgtgtgcacttcatcctggaggccgttgcagtgcagcctggagagcagcttcttagtccagaaagaaggacaaataccccaaaagccatcagagaggaggaggaggaaatagatcctaacacacagaatccgaagtatatcaccgcagcctgtgagatggtggcagaaatggtggagtctctgcagtcggtgttggctttgggtcataaaaggaatagtggcgtgccggcgtttctcacgtcagtgctcaggaacatcgtcgtcagcctggcccgcctgccccttgtcaacagctacacacgtgtgcccccactggtgtggaagcttggatggtcacccaaaccgggaggggattttggcacagcattccctgagatccccgtggagttcctccaggaaaaggaagtctttaaggagttcatctaccgcatcaacacgctaggctggaccagtcgtactcagtttgaagaaacttgggccactctccttggtgtcctggtgacgcagcccctcgtgatggagcaggaggagagcccaccagaagaagacacagagaggacgcagatcaacgtcctggccgtgcaggccatcacctcactggtgctcagtgcaatgaccgtgcctgtggccggcaacccagctgtgagctgcttggagcagcagcctcggaacaagcctctgaaagctctggacaccaggtttgggaggaagctgagcattatcagagggattgtagagcaagagattcaagcaatggtttcaaagagagagaacatcgccacccatcatttataccaggcgtgggatcctgtcccttctctgtccccggctaccacaggtgccctcatcagccacgagaagctgctgctgcagatcaaccccgagcgggagctggggagcgtgagctacaaactcggccaggtgtccatacactctgtgtggctggggaacagcatcacacccctaagggaggaggaatgggacgaggaggaggaggaggaggccgacgcccctgcaccttcatcaccacccacgtctccagtcaactccaggaaacaccgggctggagttgacatccattcctgttcgcagtttttactcgagttgtacagccgctggatcctgccatccaactcagccaggaggaccccggccatcctgatcagtgaggtggttcgatcccttctggtggtctcagacttgttcactgagcgcaaccagtttgagctgatgtatgtgacgctgacagaactgcgaagggtgcatccttcagaagacgagatcctcgctcagtacctggtgcccgccacctgcaaggcagctgccgtccttgggatggacaaggtcgtggcggagcctgtcagccgcctgctggagagcacactcaggagcagccacctgcccagcagggtcggagccctgcacggcatcctctatgtgctggagtgcgacctgctggacgatactgccaagcagctcatcccagtcatcagtgactatctcctctccaacctgaaagggatcgcccactgcgtgaacattcacagccagcagcacgtactggtcatgtgtgccactgcgttttacctgattgagaactatcctctggacgtagggccagaattttcagcatcaataatacagatgtgtggggtgatgctgtccggaagtgaggagtccaccccctctatcatttaccactgtgccctcagaggcctggagcgcctcctgctctctgagcagctctcccgcctggatgcagaatccctggtcaagctgagtgtggacagagtgaacgtgcacagcccgcaccgggccatggcggctctgggcttgatgctcacctgcatgtacacaggaaaggagaaagtcagtccgggtagaacttcagaccctaatcctgcagccccagacagcgagtcggtgattgttgctatggagcgggtgtctgttctttttgataggatcaggaaaggctttccttgtgaagccagagtggtggcgaggatcctgccccagtttctagatgacttcttcccaccccaggacatcatgaacaaagtcatcggagagtttctgtccaaccagcagccatacccccagttcatggccacggtggtgtataaggtgtttcagactctgcacagcaccgggcagtcatccatggtccgggactgggtcatgctgtccctctccaacttcacgcagaggaccccagtcgccatggccacatggagcctctcctgcttcttcgtcagcgcgtccaccagcccatgggttgcggcgatcctcccacatgtcatcagcaggatgggaaagctggagcaggtggacgtcaaccttttctgcctggttgccacagacttttacagacaccagatagaggaggagctcgaccgcagggccttccagtctgtgtttgaggtggttgcagctccaggaagcccatatcaccggctgctgacttgtttacgaaatgtccacaaggtcaccacctgctgagcgccatggtgggagagactgtgaggcggcagctggggctggagcctccagaaatctgcgccctgtgccctgcctccaccgagccagcttggtccctgtgggcttccgcacatgccgcgggcggccaggcaacgtgcgtgtctctgccatatggcagaagtgctctttgtggtacagtggccaggcaaggagtatctgcagtcccggtggggctgagcctgaggccttccggagagcaggagcagctgtgctgcacgccatgtgggtgaccaggtcctttctcctgatgctcacctgttgggtgttgccaggctgcagctgctcttgcatctgggccggaagtcctccctcctgcaggctggctgtgggcccctctgctgtcctgcagtagaaggtgccgtgagcaggctttgggaacactggcctgtgtcttcctggtggggtgtgcatgccacgccctgtgtctgtatgcacagatgccatggcatgtgctgggccagtggctgggggtgctagacacccagcaccattctcccttctctcttttcttctcaggatttaaaatttaattatatcagtaaagagattaattttaacgtaactctttctatgcccgtgtaaagtatgtgaattgcaaggcctgtgctgcatgcgacagtgttcggggaggtgggcagggcccctggccacgctccctctcctgtagccactggcatagccttcctgagcacccgctgacatttccgttgtacatgttcctgtttatgcattcacaaggtgactgggatgtagagaggcgctagtgtgcaggtggccacagcaggactaaggacaggcccccactgtcctaggggcatgctcgcctgcagcccctccttcttgggcacagacaactgttgttctccacccacattagggacagcagcctccctatcagctgagaaggccagccctccctggctgtgagcagcctccgctgtgtccagagacatgggcctcccactcctgttccttgctagccctggggcggtgtctgcccaggagctggctggccggtgttgggatctgccgttccatggatgcatgccccaagggtgtcactgagctgtgttttgtctgagcctctcttggtcaacagcaaagcttggcgtcttggcactgttagtgacagagcctggcatcccttctgcccccgttccagctgacatcttgcacggggaccccttttagtcaggagagtgcagatctgtgctcattggagactgccccactgccctgtcagagccgccactcctatccccaggccaggtccctggaccagcctcttgtttgcaggcccagaggagccaagtcattaaaatggaagtggattctggatggccggctgctgctgacataggagctggatttgggagctctgagatggggcaggagctctgcttcctcagcccttgaggcgagccaggcgaggttggcgactgtcatgtggcttggtttgctcatgcctgttgatgttttgggtattgaatatggtaagtggaggaaatgcttttctggagtctgtgcaggtgctgccttgagaccctcaagcttccacctgtccctctcctatgtggcagctgaggagcagctgacatgtggacttgtgtgctgcccacatacatgagggggcgctgaaagggagcccctgctcaaagggagcccctcctctgagcagcctttgacaggcctgtatgaggcttttcccaccagctcccaacagaggcctcccccagccaggaccacctcgtcctcgtggcagggcagcaggagcggtagaaaggggtctgatgtttgaggaggcccttaagggaagctactgaattttaacaagaaaaccaccgttcttccgtattggttgggggctcctgtttctcatcctagcttcttcctggaaagcctgctagaagctttgggaatgaggggaaagttctcagaaccgttgctgctccccacccacctcccctgcagtaagttatgtcaacagctcggagacagaagtatcacaggccagatgttgttctgctagatgtttacatttgtaagaaataacactgtgaatgtaaaacggagccattccccttggaatgcatatcgctgggctcaacacagagtttgtcttccttttgtttacgacgtgatctaaaacagtccttagcaaggggctcagaacaccccgctctggcagtgggtgtcccccactcccaaaggcctgcctgtgtgctccagagatgaatatgagctcattagtaaaatgactttacccatgcgtaagtcaagtacacgtgcacgtgcatatggacacatctgtagttttatacacgcacatctcaagacagagatgcatggcctccaagagtgcccgtgtcggttcttcctggaagttgactttcctcagacctgccaggtaaagttagctgtgtgacgggcgtccaggcgcggggcttggtcagagcagggctcattcatggctcactaggatcccaccggagaaaacggtctccatatcaactctgccgaagggaggaagactttgtcgcgttcctaaaaaacctatggcaagcaccaatcatattatccaaattttgttgaaaatgtgattaatttggttgtcaagttttgggggtgagctgtggggagactgcttttgttttgctgctggtaatatcaggaaagactttaatgaaaccagggtagaattgtttggcaatgcactgaagcgcgtttctttcccaaaacgtgcctcccttccgctgcgggcccagctgagtctgtgtaggtgacgtttccggctgccaagcgctctttgttactgtccacccccatttctgccagcacacgtgtcctttcaggaggaaaatgtgaagctgaaacccctccagacacccagaatgtagcatctgagaaggccctgtgccctaaaggacacccccgcccccaccttcatggaggggtcattccagagccctcggagccgatgaacagctcgtcctcttggagctgagctgagccccccacggagctcgggacggatagtaaacagcaataactcggtctgtggctgcctggcaggtggaagttcctccccctgaggggcggagtgaggttagttctgtgtgtctgtggggtggagtcagcctgctcctgctacctgtgagcatcctgcccagcagacatcctcacccggctttgtccctccccacttcctccctctgcggggaggacccaggaccacagctgctggccagggtaggcttggagctgtgctccggaggggccacctgagggagcgagaagaaggaagatcttgagagctgccgaggcaccctggagagctcaggatggtccaggcgagaagaggacactcgctcgccaggcctgggcctcctgggaaggagggagccgctcagagcgccgcatgacaactgaaggcaacctggaaggttcagaggccactcttcccccgtgtgcctgtcacgctctggtgcagtccaaggaacgccttcccctcagttgtttccaaaagcagagtctcccgctgcaatctgggtggtgattgccagccttggaggattgtggccaacgtggacctgcctacggagggtgggctctgacccacgtggggcctccttgtccaggtctcattgctttgcgctgtggtcagagggactgtcagctgagcctgagctcccctggagccagcagggctgtgatgggtgagtcccggagccccacccagacctgactgcttctgagagcaaagggaaggactgacgagagatgtatatttaatttttttaactgctgcaaacattgtacatccaaattaaaggaaaaacattgaaaccatca

SEQ ID NO: 5 - DNA, 13447 bp, Macaca mulatta
  source 1..13447: mol_type = genomic DNA
gcaaggcgccgcgggggctgccgggacgggtccaagatggacggccgcttcggttccgcttttacccgcggcccagagccccattcattgccccggtgctgagcggcgctgcgagtcggcccgaggcctccggggactgcctagccgggcgggagaccgccatggcgaccctggaaaagctgatgaaggccttcgagtctctcaagtccttccagcagcagcagcagcagcagcagcagcaacagccgccgccgccgccgccgccgccgcctcctcctcctcagcttcctcagccgccgcaggcacagccgatgctgcctcagccgcagccgcccccgccgccgcccccgccaccacccggcccggctgtggctgaggagccgctgcaccgaccaaagaaagaactttcagctaccaagaaagaccgtgtgaatcattgtctgacaatatgtgaaaacatagtggcacagtctgtcagaaattctccagaatttcagaaacttctgggcatcgctatggaactttttctgctgtgcagtgatgacgcagagtcggatgtcagaatggtggctgatgaatgcctcaacaaagttatcaaagctttgatggattctaatcttccaaggttacagctcgagctctataaagaaattaaaaagaatggtgcccctcggagtttgcgtgctgccctgtggaggtttgccgagctggctcacctggttcggcctcagaaatgcaggccttacctggtgaaccttctgccgtgcctaagtcgaacaagcaagagacccgaggaatcagtccaggagaccttggctgcagctgttcccaaaattatggcttctttcggcaattttgcaaatgacaatgaaattaaggttttgttaaaggccttcatagcgaacctgaagtcaagctcccccactattcggcggacagctgctggatcagcagtgagcatctgccagcactcaagaaggacacagtatttctatagctggctactaaatgtgctcttaggcttactggttcctgtcgaggaggagcactccaccctgctgattcttggcgtgctgctcaccctgaggtatttggtgcccttgctgcagcagcaggtcaaggatacaagcctgaaaggcagcttcggagtgacacggaaagaaatggaggtctctccttctgcagagcagcttgtccaggtttatgaactgacgttacatcatacacagcaccaagaccacaatgttgtgaccggagccctggagctgttgcagcagctcttcagaacgcctccccccgagcttctgcaagccctgaccacagtggggggcattgggcagcttaccgccgctaaggaggagtctggtggccgaagccgtagtgggagtattgtggaacttatagctggagggggttcctcatgcagccctgtcctttcaagaaaacaaaaaggcaaagtgctcttaggagaagaagaagccttggaggatgactctgaatcgagatcggatgtcagcagctctgcctttgcagcctcagtgaaggatgatatcagtggagagctggctacttcttcaggggtttccactccagggtcagcaggtcacgacatcatcacggagcagccacggtcacagcacacgctgcaggcggactcagtggatctggccagctgtgacttgacaagctctgccacggatggggatgaggaggatatcttgagccacagctccagccaggtcagcgccgtcccatctgaccctgccatggacctgaatgatgggacccaggcctcctcgcccatcagcgacagctcccagaccaccaccgaagggcctgattcagctgtcaccccttcagacagttctgaaattgtgttagacggtaccgacaaccagtatttgggcctgcagattggacagccccaggatgaagatgaggaagccacaggtgttcttcctgacgaagcctcggaggccttcaggaactcttccatggcccttcaacaagcacatttattgaaaaacatgagtcacagcaggcagccttctgacagcagtgttgataaatttgtgttgagagatgaagctactgaaccgggtgatcaagaaaacaagccttgccgcatcaaaggtgacattggacagtccactgatgatgattctgcacctcttgtccattgtgtccgccttttatctgcttcatttttgctaacagggggaaaaaatgtgctggttccggaccgggatgtgagggtcagcgtgaaggccctggccctcagctgtgtgggagcagctgtggctctccacccagaatctttcttcagcaaactctataaagttcctcttgacaccacagaataccctgaggaacaatatgtctcagatatcttgaactacatcgatcatggagacccacaggttcgaggagccactgccattctctgtgggaccctcatctgctccatcctcagcaggtcccgcttccacgtgggagattggatgggcgccattagaaccctgacaggaaacacattttctttggcggattgcattcctttgctgcggaaaacactgaaggacgagtcttctgtcacttgcaagctggcctgtacagctgtgaggcattgtgtcatgagtctctgcagcagcagctacagtgagttaggactgcagctgatcatcgacgtgctgactctgaggaacagttcctattggctggtgaggacagagcttctggaaacccttgcggagattgacttcaggctggtgagctttttggaggcaaaagcagaaaacttacacagaggggctcatcattatacagggcttttaaagctgcaagaacgagtgctcaataatgttgtcatccatttgcttggggatgaagaccccagggtgcgacatgttgctgcagcatcattaattaggcttgtcccaaagctgttttataaatgtgaccaaggacaagctgacccagtagtggccgtggcaagagatcaaagcagtgtttacctgaaacttctcatgcatgagacgcagcctccatctcatttctccgtcagcacaataaccagaatatacagaggctataacctactgccaagcataacagatgtcactatggaaaataacctttcaagagttattgcagcagtttctcatgaactgatcacatcaaccacgagagcactcacttttggatgctgtgaagctttgtgtcttctttccactgccttcccagtttgcatttggagtttaggttggcactgtggagtgcctccactgagcgcctccgatgagtctaggaagagctgtaccgttgggatggccacgatgattctgaccctgctctcgtcagcttggttcccattggatctctcagcccatcaagatgctttgattttggccggaaacttgcttgcagccagtgctcctaaatctctgagaagttcatgggcctctgaagaagaagccaacccagcagccaccaagcaagaggaggtctggccagccctgggggaccgggccttggtgcccatggtggagcagctcttctcccacctgctgaaggtgatcaacatttgtgcacatgtcctggacgacgtggctcctggaccggcaataaaggcagccttgccttctctaacaaaccccccttctctaagtcccatccgacgaaaggggaaggagaaagaaccaggagaacaagcatctgtaccgttgagtcccaagaaaggcagtgaggccagtgcagcttctagacaatctgatacctcaggtcctgttacaacaagtaaatcctcatcactggggagtttctatcatcttccttcatacctcaaactgcatgatgtcctgaaagctacgcacgctaactacaaggtcaccttggatcttcagaacagcacggaaaaatttggagggtttcttcgctcagccttggacgttctctctcagattctagagctggccacactgcaggacattgggaagtgtgttgaggagatcctaggatacctgaaatcctgctttagtcgagaaccaatgatggcaactgtttgtgttcaacaattgttgaagactctctttgggacaaacttggcctcccagtttgacggcttatcatccaaccccagcaagtcacaaggccgagcacagcgccttggctcctccagtgtgaggccaggcttgtaccactactgcttcatggccccgtacacccacttcacccaggccctcgctgacgccagcctgaggaacatggtgcaggcggagcaggagcacgacacctcgggatggtttgatgtcctccagaaagtgtctacccagttgaagacgaacctcacaagtgtcacaaagaaccgtgcagataagaatgctattcataatcacattcgtttgtttgaacctcttgttataaaagctttaaaacagtacacgacaacaacatctgtgcagttacagaagcaggttttagatttgctggcgcagctggttcagttacgggttaattactgtcttctggattcagatcaggtgtttattggctttgtattgaaacagttcgaatacattgaagtgggccagttcagggaatcagaggcaatcattccaaacatctttttcttcttggtattactgtcttatgaacgctatcattcaaaacagatcattggaattcctaaaatcattcagctctgtgatggcatcatggccagtggaaggaaggctgtgacacacgccataccggctctgcagcccatagtccatgacctttttgtattaagaggaacaaataaagctgatgcaggaaaagagcttgaaacccaaaaagaagtggtggtatcaatgttactgagactcatccagtaccatcaggtgttggagatgttcattctcgtcctgcagcagtgccacaaggagaatgaagacaagtggaagcgactgtctcgacagatagctgacatcatcctcccaatgttagccaaacagcagatgcacattgactctcatgaagcccttggagtgttaaatacattatttgagattttggccccttcctccctccgtccggtggacatgcttttacggagtatgttcgtcactccaaacacaatggcatctgtgagcactgttcaactgtggatatcaggaattctggccattttgagggttctgatttcccagtcaactgaagatattgttctttctcgtattcaggagctctctttctctccatatttaatctcctgtccagtaattaataggctaagagatggggacagtaattcagcactagaagaacacagtgaagggaaacaaataaagaatttgccagaagaaacattttcaaggtttctattacaactggtgggtattcttttagaagacattgttacaaaacagctgaaggtggaaatgagtgagcagcaacatactttctattgccaagaactaggcactctgctaatgtgtctgatccacatcttcaagtctggaatgttccggagaatcacagcagctgccactagactgttccgcagtgatggctgtggcggcagtttctacaccctggacagcttgaatttgcgggctcgttccatgatcaccacccacccggccctggtgctgctctggtgtcagatcctgctgcttgtcaaccacaccgactaccgctggtgggcagaagtgcagcagaccccgaaaagacacagtctgtccagcacaaagttacttagtccccagatgtctggagaagaggaggattctgacttggcagccaaacttggagtgtgcaatagagaaatagtacgaagaggggctctcattctcttctgtgattatgtctgtcagaacctccatgactccgagcacttaacgtggctcattgtaaatcacattcaagatctgatcagcctttcccacgagcctccagtacaggacttcatcagtgctgttcatcggaactccgctgccagcggcctcttcatccaggcaattcagtctcgttgtgaaaacctttcaactccaaccactctgaagaaaactcttcagtgcttggaggggatccatctcagccagtcgggagctgtgctcacgttgtatgtggacaggctgctgtgcacccctttccgtgtgctggctcgcatggtcgacatccttgcttgtcgccgggtagaaatgcttctggctgcaaatttacagagcagcatggcccagttgccaatggaagaactcaacagaatccaggaataccttcagagcagcgggctcgctcagagacaccagaggctctattccctgctggacaggtttcgtctctccaccatgcaagactcacttagtccctctcccccagtctcttcccacccgctggacggggatgggcacgtgtcactggaaacagtgagtccggacaaagactggtacattcatcttgtcaaatcccagtgttggaccaggtcagattctgcactgctggaaggtgcagagctggtgaatcggattcctgctgaagatatgagtgccttcatgatgaactcggagttcaacctaagcctgctagctccatgcttaagcctagggatgagtgaaatttctggtggccagaagagtccgctttttgaagcagcctgtgaggtgactctggcccgcgtgagcagcaccgtgcagcagctccctgctgtccaccacgtcttccagtccgacctgcctgcagagccggcggcctactggagcaagttgaatgatctatttggggatgctgcgctgtatcagtccctgaccactctggcccgggccctggcacagtacctggtggcggtctccaaactgcccagtcacttgcaccttcctcctgagaaagagaaggacaccatgaaattcgtggtggcaacccttgaggccctgtcctggcatttgatccatgagcagattccgctgagtctggatctccaggcagggctggactgctgctgcctggccctgcagctgcctggcctctggagcgtggtctcctccgcagagtttgtgacccacgcctgctccctcatccactgtgtgcacttcatcctggaggccgttgcagtgcagcctggagagcagcttcttagtccagaaagaaggacaaataccccaaaagtcatcagagaggaggaggaggaaatagatcctaacacacagaatccgaagtatatcaccgcagcctgtgagatggtggcagaaatggtggagtctctgcagtcggtgttggctttgggtcataaaaggaatagtggcgtgccggcgtttctcacgtcagtgctcaggaacatcgtcgtcagcctggcccgcctgccccttgtcaacagctacacacgtgtgcccccactggtgtggaagcttggatggtcacccaaaccgggaggggattttggcacagcattccctgagatccccgtggagttcctccaggaaaaggaagtctttaaggagttcatctaccgcatcaacacgctaggctggaccagtcgtactcagtttgaagaaacttgggccactctccttggtgtcctggtgacgcagcccctcgtgatggagcaggaggagagcccaccagaagaagacacagagaggacgcagatcaacgtcctggccgtgcaggccatcacctcactggtgctcagtgcaatgaccgtgcctgtggccggcaacccagctgtgagctgcttggagcagcagcctcggaacaagcctctgaaagctctggacaccaggtttgggaggaagctgagcattatcagagggattgtagagcaagagattcaagcaatggtttcaaagagagagaacatcgccacccatcatttataccaggcgtgggatcctgtcccttctctgtccccggctaccacaggtgccctcatcagccacgagaagctgctgctgcagatcaaccccgagcgggagctggggagcgtgagctacaaactcggccaggtgtccatacactctgtgtggctggggaacagcatcacacccctaagggaggaggaatgggacgaggaggaggaggaggaggccgacgcccctgcaccttcatcaccacccacgtctccagtcaactccaggaaacaccgggctggagttgacatccattcctgttcgcagtttttactcgagttgtacagccgctggatcctgccatccaactcagccaggaggaccccggccatcctgatcagtgaggtggttcgatcccttctggtggtctcagacttgttcactgagcgcaaccagtttgagctgatgtatgtgacgctgacagaactgcgaagggtgcatccttcagaagacgagatcctcgctcagtacctggtgcccgccacctgcaaggcagctgccgtccttgggatggacaaggtcgtggcggagcctgtcagccgcctgctggagagcacactcaggagcagccacctgcccagcagggtcggagccctgcacggcatcctctatgtgctggagtgcgacctgctggacgatactgccaagcagctcatcccagtcatcagtgactatctcctctccaacctgaaagggatcgcccactgcgtgaacattcacagccagcagcacgtactggtcatgtgtgccactgcgttttacctgattgagaactatcctctggacgtagggccagaattttcagcatcaataatacagatgtgtggggtgatgctgtccggaagtgaggagtccaccccctctatcatttaccactgtgccctcagaggcctggagcgcctcctgctctctgagcagctctcccgcctggatgcagaatccctggtcaagctgagtgtggacagagtgaacgtgcacagcccgcaccgggccatggcggctctgggcttgatgctcacctgcatgtacacaggaaaggagaaagtcagtccgggtagaacttcagaccctaatcctgcagccccagacagcgagtcggtgattgttgctatggagcgggtgtctgttctttttgataggatcaggaaaggctttccttgtgaagccagagtggtggcgaggatcctgccccagtttctagacgacttcttcccaccccaggacatcatgaacaaagtcatcggagagtttctgtccaaccagcagccatacccccagttcatggccaccgtggtgtataaggtgtttcagactctgcacagcaccgggcagtcatccatggtccgggactgggtcatgctgtccctctccaacttcacacagaggaccccagtcgccatggccacatggagcctctcctgcttcttcgtcagcgcgtccaccagcccatgggttgcggcgatcctcccacatgtcatcagcaggatgggaaagctggagcaggtggacgtcaaccttttctgcctggttgccacagacttttacagacaccagatagaggaggagctcgaccgcagggccttccagtctgtgtttgaggtggttgcagctccaggaagcccatatcaccggctgctgacttgtttacgaaatgtccacaaggtcaccacctgctgagcgccatggtgggagagactgtgaggcggcagctggggctggagcctccagaaatctgcgccctgtgccctgcctccaccgagccagcttggtccctgtgggcttccgcacatgccgcgggcggccaggcaacgtgcgtgtctctgccatatggcagaagtgctctttgtggtacagtggccaggcaaggagtatctgcagtcccggtggggctgagcctgaggccttccggagagcaggagcagctgtgctgcacgccatgtgggtgaccaggtcctttctcctgatgctcacctgttgggtgttgccaggctgcagctgctcttgcatctgggccggaagtcctccctcctgcaggctggctgtgggcccctctgctgtcctgcagtagaaggtgccgtgagcaggctttgggaacactggcctgtgtcttcctggtggggtgtgcatgccacgccctgtgtctgtatgcacagatgccatggcatgtgctgggccagtggctgggggtgctagacacccagcaccattctcccttctctcttttcttctcaggatttaaaatttaattatatcagtaaagagattaattttaacgtaactctttctatgcccgtgtaaagtatgtgaattgcaaggcctgtgctgcatgcgacagtgttcggggaggtgggcagggcccctggccacgctccctctcctgtagccactggcatagccttcctgagcacccgctgacatttccgttgtacatgttcctgtttatgcattcacaaggtgactgggatgtagagaggcgctagtgtgcaggtggccacagcaggactaaggacaggcccccactgtcctaggggcatgctcgcctgcagcccctccttcttgggcacagacaactgttgttctccacccacattagggacagcagcctccctatcagctgagaaggccagccctccctggctgtgagcagcctccgctgtgtccagagacatgggcctcccactcctgttccttgctagccctggggcggtgtctgcccaggagctggctggccggtgatgggatctgccgttccatggatgcatgccccaagggtgtcactgagctgtgttttgtctgagcctctcttggtcaacagcaaagcttggcgtcttggcactgttagtgacagagcctggcatcccttctgcccccgttccagctgacatcttgcacggggaccccttttagtcaggagagtgcagatctgtgctcattggagactgccccactgccctgtcagagccgccactcctatccccaggccaggtccctggaccagcctcttgtttgcaggcccagaggagccaagtcattaaaatggaagtggattctggatggccggctgctgctgacataggagctggatttgggagctctgagatggggcaggagctctgcttcctcagcccttgaggcgagccaggcgaggttggcgactgtcatgtggcttggtttgctcatgcctgttgatgttttgggtattgaatatggtaagtggaggaaatgcttttctggagtctgtgcaggtgctgccttgagaccctcaagcttccacctgtccctctcctatgtggcagctgaggagcagctgacatgtggacttgtgtgctgcccacatacatgagggggcgctgaaagggagcccctgctcaaagggagcccctcctctgagcagcctttgacaggcctgtatgaggcttttcccaccagctcccaacagaggcctcccccagccaggaccacctcgtcctcgtggcagggcagcaggagcggtagaaaggggtctgatgtttgaggaggcccttaagggaagctactgaattttaacaagaaagccaccattcttccgtattggttgggggctcctgtttctcatcctagcttcttcctggaaagcctgctagaagctttgggaatgaggggaaagttctcagaaccgttgctgctccccacccacctcccctgcagtaagttatgtcaacagctcggagacagaagtatcacaggccagatgttgttctgctagatgtttacatttgtaagaaataacactgtgaatgtaaaacggagccattccccttggaatgcatatcgctgggctcaacacagagtttgtcttccttttgtttacgacgtgatctaaaacagtccttagcaaggggctcagaacaccccgctctggcagtgggtgtcccccactcccaaaggcctgcctgtgtgctccagagatgaatatgagctcattagtaaaatgactttacccatgcgtaagtcaagtacacgtgcacgtgcatatggacacatctgtagttttatacacgcacatctcaagacagagatgcatggcctccaagagtgcccgtgtcggttcttcctggaagttgactttcctcagacctgccaggtaaagttagctgtgtgacgggcgtccaggcgcggggcttggtcagagcagggctcattcatggctcactaggatcccaccggagaaaacggtctccatatcaactctgccgaagggaggaagactttgtcgcgttcctaaaaaacctatggcaagcaccaatcatattatccaaattgtgttgaaaatgtgattaatttggttgtcaagttttgggggtgagctgcggggagactgcttttgttttgctgctggtaatatcaggaaagactttaatgaaaccagggtagaattgtttggcaatgcactgaagcgcgtttctgtcccaaaacgtgcctcccttccgctgcgggcccagctgagtctgtgtaggtgacgtttccggctgccaagcgctctttgttactgtccacccccatttctgccagcacacgtgtcctttcaggaggaaaatgtgaagcggaaacccctccagacacccagaatgtagcatctgagaaggccctgtgccctaaaggacacccccgcccccaccttcatggaggggtcattccagagccctcggagccgatgaacagctcgtcctcttggagctgagctgagccccccacggagctcgggacggatagtaaacagcaataactcggtctgtggctgcctggcaggtggaagttcctccccctgaggggcggagtgaggttagttctgtgtgtctgtggggtggagtcagcctgctcctgctacctgtgagcatcctgcccagcagacatcctcacccggctttgtccctccccacttcctccctctgcggggaggacccaggaccacagctgctggccagggtaggcttggagctgtgctccggaggggccacctgagggagcgagaagaaggaagatcttgagagctgccgaggcaccctggagagctcaggatggtccaggcgagaagaggacactcgctcgccaggcctgggcctcctgggaaggagggagccgctcagagcgctgcatgacaactgaaggcaacctggaaggttcagaggccactcttcccccgtgtgcctgtcacgctctggtgcagtccaaggaacgccttccctcagttgtttccaaaagcagagtctcccgctgcaatctgggtggtgattgccagccttggaggattgtggccaacgtggacctgcctacggagggtgggctctgacccacgtggggcctccttgtccaggtctcattgctttgcgctgtggtcagagggactgtcagctgagcctgagctcccctggagccagcagggctgtgatgggcgagtcccggagccccacccagacctgactgcttctgagagcaaagggaaggactgacgagagatgtatatttaatttttttaactgctgcaaacattgtacatccaaattaaaggaaaaacattgaaacca

SEQ ID NO: 6 - DNA, 13498 bp, Homo sapiens
  source 1..13498: mol_type = genomic DNA
ttttttttttttttttttgatggtttccatttttttcctttaatttggatgtacaatgtttgcagcagttaaaaaattaaatatacatctctcgtcagtccttccctttgctctcagaagcattcaggtctgggtggggctccgggactcgcccatcacagccctgctggctccaggggagctcaagctcagctgacagtccctctgaccacggtgcaaagcagtgagacctggacaaggaggccccacttgggtcagagcccaccctccgtaggcaggtccacgttggccacgatcctccaaggctggcagttaccacccagattgcagcgggagactctgctcttagaaacaactgaggggaaggcgttcctttgactgcaccagagcgtgacaggcacatgggggaagagcggcccctgaaccttccaggttgccttcagttgtcatgcggcattctgagcagctccctccttcccaggaggcccaggcccggcaagcgagtgtcctcgtctgagccatcctgagctctccaaggtccctcagcagctctcaagatcttccttcttctcactcctacacgtgacccctctggaggacagctccaagtctaccctggccagcagctgtggtcccgggtcctccccgcagagggaggaagcgggggagggacaaagcccgatgaggatgtctgctgggaaggatgctcacaggtagcaagagaagcctgactccacccaccagacacacagaactaacctcactccaccccgcaacgggaggaagttccacctgccaggcggccacacaccgagttattgctgtctactatccgtcccgagctccacgtggggctcatctcagctccaagaggaggagctgttcattggctccgagggctctgaaatgaccccctccatgaagatgggggcgaggggtgtcctttagggcacagggccttctcagatgctacattctgggtgtctggagggggttcagcttcacattttccccttgaaaggacacatgcgctggcagaaatgagggtggacagtaacaaagagcacttggcagctggaaacatcacctacatagactcagctgggcccgcagcggaagggaggcacattttgggaaagaaacacgcttcagtgcattgccaaacaattctaccctggtttcattaaaatctttcccgatattaccagcaggaaaacaaaagcaatctccccacagcccacccccaaaacttgacaaccaaattaatcacatttgcaacaaaatttggataatacgatgggtgcttgccacagatttttaggaacatgataaagtcttcctcccttctgcagagagctgatatggagaccatcttcgccagtgggatcctagtgggcaatgaatgagccctgccctgaccacgtcccacgcctggatgtccgtcacgcggctaacttgacctggcgggtctaaggaaagtcaacttccaggaagaaccgacacgggcactcttagaggccatgcatctccgtcttgagaggtgtgtgtgtaaaattatagatgtgtctatatgcacatgcatggatactttatgtatatgcgtgggtgaagtcatttttactaatgagctcatattcatctccggagcacacaggcaggtctttgggggtgggggacacctactgccagagcggggtgttctgagccccttgctaaggactggtttagatcacgtcgtaaacaagaggaagacaaactctatgttgagcccagcgatatgcattccaagggaatggctctgttttacattcacagtgttatttcttacaaatgtaaacatctagccaggaacaacatctggcctgtgatactgctgtctcagagctgctgacataacctgcgggggaggcgggaggcgggtggggagcagccaacagttctgagaactttcccctcgttcccaaaccttctagcgggctttccaggaaaaagctaggatgagaaacaggagcccccaaccaatacggaatggtgattttcttacgtgttataattcagtagcttcccttaagggcctcctcaaacatcggacccctttctaccgctcctgctgccccgccacgaggacgaggtggtcctggctgggggaggcctctgttgggagctggtgggaaaagcctcatacaggcctggcagaggctgctcagaggaggggctccctttcagctccccctcacgtatgtgggcagcatacaagtccacatctcagctgctccccagctgccacataggagagggacaggtggaagcttgggggtctcaaggcagcacctgcacagagttccaacatttcctccacttaccacattcaatacccaaaacatcgacgggcatgaccaaaccaagccacatgacagtcgccaaccttgcctggctcgcctctagggctgaggaagcagagcccctgcctcgtctcacagccagtcggcaagcagagctcccaaatccagctcctacatcagcagcagcccggccatccagaatccacttccattttaatgacttggctcctctgggcctgcaaacaggaggctggtccagggacctggcctggggataggagtggcggctctgacagggccgtggggcagtctccgatgagcacagatctgcactctcctgactaaaaggggtcaccgtgcaagatgtcagctggaacgggggcagaagggatgctgggctctgtcactaacagtgccaagacaccaagctttgctgttgaccgagagaggctcagacaaaacacagctcagtgacactcttagggcatgcatccatggagcagcaggtcccaacacctgccagccagctcctaggcagacgccaccccagggctagcaaggaacaggagtgggaggcccatgtctctggacacagtggaggctgctcacagccagggagggctggccttctcagctgagtgacagggaggctgctgtccctgactggtgggtggagaacgacagtcgtctgtgcccgaggaggaggggctgcaggtgagcgcacccctaggataatgggggcctgtcctcagtcctgctgtggccacctgcccactaacgcctctctacatcccagtcaccttgtgaatgcataaacaggaacatgtacaacggaaatgtcagcgggtgctcaggagggctatgccagtggctacaggagagggagcgtggccgggggccctgtccaccaccccggacgctgtcgcatgcagcacaggccttgcgattcacatactttacacgggcatagaaagagttacgttaaaattaatctctttactgatataattaaattttaaatcctgagaagaaaagagagaagggagaatggtgccgggtgtctagcacccccagccactggcccagcacaggccatggcatctgtgcatccagacacggggcgtggcatgcacaccccaccagggagacccaggccagtgttcccaaagcctgctcacggcaccttctactgcaggacagcagaggggccaacagccagcctgcaggagggaggacttctggcccagatgcaagagcagctgcaacctggcaacaaccagcaggtgactatcaggagaaaggacctggtcacccacatggggtgcagcacagctgctcctgctttctggaaggcctcaggctcagccccaccaggactgcagacactccctgcctggccactgccacaaagagcacttctgccacatggcagagacacgcacgttgcctggccgcccgcggcatgtgcggaagcccatagggaccaagctggctcggtggaggcagggcacaagggcgcagacttccaaaggctccggccccagctgccgcctcacagtctctcccaccatggcgctcagcaggtggtgaccttgtggacatttcgtaaacaagtcagcagccggtgatatgggcttcctggggctgcaaccacctcaagcacagactggaaggccctgcggtcgagctcctcctctatctggtgtctgtagaagtctgtggcgaccaggcagaaaaggttcacgtccacctgctccagcttgcccatcctgctgatgacatgtgggaggatcgccgcgacccacgggctggtggacgcgctgacaaagaagcaggagaggctccacgtggccatggcgaccggggccctctgcgtgaagttggagagggacagcatgacccagtcccggaccatggacgactgcccggtgctgtgcagagtctgaaacaccttatacaccacggtggccatgaactgggggtatggctgctggttggacagaaactctccgatgactttgttcatgatgtcctggggtgggaagaagtcgtctagaaactggggcaggatcctggccaccactctggcttcacaaggaaagcctttcctgatcctatcaaaaagaacagatacccgctccatagcaacaatcactgactcgctgtcgggggctgcaggattagggtctgaagttctacccggactgactttctcctttcctgtgtacatgcaggtgagcatcaggcccagagccgccatggcccggtgcgggctgtgcacgttcactctgtccacactcagcttgaccagcgattctgcatccaggcgggagagctgctcagagagcaggaggcgctccaggcctctgagggcacagtggtaaatgatggagggggtggactcctcacttccagacagcatcaccccacacatctgtattattgatgctgaaaattccggccctacgtccagaggatagttctcaatgaggtaaaacgcagtggcacacatgaccagtacgtgctgctggctgtgaatgttcacgcagtgggcgatccctttcaggttggagaggagatagtcgctgatgaccgggatgagctgcttggcagtgtcgtccagcaggtcgcactccagcacatagaggacgccgtgcagggctccaaccctgctgggcaggtggctgctcctgagcgtgctctccagcaggcggctgacaggctccgccacggccttgtccatcccaaggacggcagctgccttgcaggtggcaggcaccaggtactgagcgaggatctcgtcttctgaagggtgcacccttcgcagttctgtcagcgtcacatacatcagctcaaactggttgcgctcggtgaacaagtctgagaccactagaagggatctgaccacctcactgatcaggatggccggggtcctcctggctgagctggacggcaggatccagcggctgtacaactcaagcaaaaactgcgaacaggagtggatgtcaactccagcccggtgtttcctggagttgactggagacgtgggtggtgacgaaggtgcaggggcgtcggcctcctcctcctcttcctcgtcccattcctcctccctcaggggtgtgatgctgttccccagccacacggagtgtatggacacctggccgagtttgtagctcatgctccccagctcccgctcggggttgatctgtagcagcagcttctcgtggctgatgagggcacctgtagtagccggagacagagaagggacaggatcccatgcctgatataaatgatgggtggcaatattctctctctttgaaaccattgcttgaatctcttgctccacaatccctctgataatgctcagcttcctcccaaacctggtgtcgagagctttcagaggcttgttccggggctgctgctccaagcagcttacagctgggttgccggccacaggcacagtcattgcactgagcaccagtgaggtgatggcctgcacggccaggacgttgatctgggtcctctctgtgtcttcttctggtgggctctcctcctgctccatcacgaggggctgcgtcaccaggacaccaaggagggtggcccaagtttcttcaaactgagtacgactggtccagcctagtgtgttgatgcggtagatgaactccttaaagacttccttttcctggaggaactccacggggatctcagggaatgctgtgccaaaatcccctcccggtttgggtgaccatccaagcttccacaccagtgggggcacacgtgtgtagctgttgacaaggggcaggcgggccaggctgatgatgatgttccttagcaatggcgtgagaaacgccggcacgccgctattccttttatgacccaaggccaacaccgactgcagagactccaccatttctgccaccatctcacaggctgcagtgatatacttaggattctgtgtgtttggatctacttcctcctcctcctcgctgatggcttttggggtatttgtccttctttctggactaagaagctgctctccaggctgcactgcaacggcctccaggatgaagtgcacacagtagatgagggagcaggcgtgggtcacaaactctgtggaggagaccacgctccagaggccaggcagctgcagggccaggcagcagcagtccagccctgcctggagatccagactcagcgggatctgctcatggatcaaatgccaggacagggcctcaagggttgccaccacgaatttcacaatgtccttctctttctcaggaggaaggtgcaaatgactgggcagtttggagaccaccaccaggtactgtgccagggcccgggccagagtgggcagggactgatacagtgcagcatccccaaacagatcattcaacttgctccagtaggccgccggctctgcaggcagctcgggctggaagacatgatggacagcagggagctgctgcacggtgccgctcacacgggccagagtcacctcacgggctgcttcaaaaagggcactcttctggccaccagaaatttcactcatccctaggcttaagcatggagctagcaggcttaggttgaactccgagttcatcatgaaggcattcatatcttcagcaggaatccgattcaccagctctgcaccttccagcagtgcagaatctgacctggtccaacactgggatttgacaagatgaacgtaccagtctttgtccggactcactgtttccagtgacacgtgcccatccccgtccagcgggtgggaagagactggaggagagggactaagtgagtcttgcatggtggagagacgaaacctgtccagcagggaatagagcctttggtgtctctgagcgagcccgctgctctgaaggtattcctggattctgttgagttcttccattggcaactgggccatgctgctctgtaaatttgcagccagaagcatttctacccggcgacaagcaaggatgtcgaccatgcgagccagcacacggaaaggggtgcacagaagcctgtccacatacagcgtgagcacagctcccgactggctgagatggatcccctccaagcactgaagagttttcttcagcatggttggagttgaaaggttttcacaacgagactgaattgcctggatgaacaggccgctggcagcagagttccgatgaacggcactgatgaagtcctgtactggaggctcgtgggaaaggctgatcagatcttgaatgtgatttacaatgagccacgttaagtgctcggagtcatggaggttctgacagacataatcacagaagagaatgagagcccctcttcgtactatttctctattgcacattccaagtttggctgccaagtcagaatcctcctcttctccagacatctggggactaagtaactttgtgctggacagactgtgtcttttcggggtctgctgcacttctgcccaccagcggtagtcggtgtggttgacaagcagcagtatctgacaccagagcagcaccagggccgggtgggtggtgatcatggaacgagcccgcaagttcaagctgtccagggtgtagaaactgccgccacagccatcactgcggaacagcctagtggcagctgctgtgattctccggaacattccagacttgaagatgtggatcagacacattagcagtgtgcctagttcctggcaatagaaagtatgttgctgctcactcatttccaccttcagctgttttgtaacaatgtcttctaaaagaataccaaccagttgtaatagaaaccttgaaaatgtttcttctggcaaattctttatttgtttcccttcactgtgttcttctagcgttgaagtactgtccccatctcttaacctattaattactgtacaggagattaaatacggagagaaggagagctcctgaatacgagaaagaacaatatcttcagttgactgggaaatcagaaccctcaaaatggccagaattcccgatatccacagttgaacagtgctcacggacgccattgtgtttggagtgacgaacatactccgtaaaagcatgtctaccggacggagggaggaaggggccaaaatctcaaataatgtatttaacactccaagggcttcatgagagtcaatgtgcatctgctgtttggctaacattgggaggatgatgtcagctatctgtcgagacagtcgcttccacttgtcttcattctccttgtggcactgctgcaggacaagaatgaacatctccaacacctgatggtactggatgagtctcagtaacattgacaccaccacctctttttgggtttcaagctcttttcctgcatcagctttatttgttcctcttaatacaaagaggtcgtggactatgggctgcagagccggtatggcatgtgtcacagccttccttccactggccatgatgccatcacagagctgaatgattttaggaattccaatgatctgttttgaatgatagcgttcataagatagtaataccaagaagaaaaagatgtttggaatgattgcctctgattccctgaactggcccacttcaatgtattcaaactgtttcaatacaaagccaataaacacctgatctgaatccagaagacagtaattaacccgtaactgaaccagctgcgccagcaaatctaaaacctgcttctgtaactgcacacatgttgtagtcgtgtactgttttaaagcttttataacaagaggttcaaacaaacgaatgtgattatgaatagcattcttatctgcacggttctttgtgacactcgtgaggtttgtcttcaactgggtagacactttctggaggacatcaaaccatcccgaggtgtcgttctcctgctccgcctgcaccatgttcctcaggctggcgtcagcgagggcctgggtgaagtgggtgtacggggccatgaagcagtagtggtacaagcctggcctcacactggaggagccaaggcgctgtgctcggccttgtgacttgctggggttggaagataagccatcaaactgggaggccaagtttgtgccaaagagagtcttcaacaattgttgaacacaaacagttgccatcattggttctcgactaaagcaggatttcaggtatcctaggatctcttcaacacacttcccaatgtcctgcagtgtggccagctctagtatctgagaaagaacatccaaggctgagcggagaaaccctccaaacttttccgtgctgttctgaagatccagcgtgaccttgtagttagcgtgtgtagctttcaggacatcatgcagtttgaggtatgaaggaagatgatagaaactccccagtgatgaggatttacttgttgtaacaggacctgaggtatcagattgtctagaagctgcactggcctcactgcctttcttgggactcaacggtacagatgcttgttctcctggttctttctccttcccctttcgtcggatgggacttagagaaggggggtttgttagagaaggcaaggctgcctttattgcgggtccaggagccacgtcatccaggacgtgggcacaaatgttaatcaccttcagcaggtgagagaagagctgctccaccatgggcaccagggcccggtcccccagggctggccagacctcctcttgcttggtggctgctgggttggcttcttcttcagaggcccatgaacttctcagagatttgggagcactggctgcaagcaagtttccggccaaaatcaaagcatcttgatgggctgagagatccaatgggaaccaagctgacgagagcagggtcagaatcattgtggccatcccaacggtacagctcttcctagactcatctgaggcactcagtggaggcactccacagtgccaacctaaactccaaatgcaaactgggaaggcagtggaaagaagacacaaagcttcacagcatccaaatgtgagtgctctggtggttgatgtgattagttcatgagaaactgctgcaataactcttgaaaggttattttccatagtgacgtctgttatgcttggtagtaggttatagcctctatatattctggttattgtgctgacggagaaatgagatggaggctgcgtctcatgcatgagaagtttcaggtaaacactgctttgatctcttgccacggccactactggatcagcttgtccttggtcacatttataaaacagctttgggacaagcctaattagtgatgctgcggcaacatgtcgcaccctggggtcttcatctccaagcaaatggatgacaacattattgagcactcgttcttgcagttttaaaagccctgtataatgatgagcccctctgtgtaagttttctgcttttgcctccaaaaagctcaccagcctgaagtcaatctctgcaagggtttccagaagctctgtcctcaccagccaataggaactgttcctcagagtcagcacatcgatgatcagctgcagtcctaactcactgtagctgctgctgcagagactcatgacacagttcctcacagctgtacaagctaacttgcaagtaacagaagactcatccttcagtgttttccgcagcaaaggaatgcaatccgccaaagaaaatgtatttcctgtgagggttctaatggtgcccatccaatctcccacgtggaagcgggacctgctgaggatggagcagatgagggtcccacagagaatggcagtggctcctcgaacctgtgggtctccatgatcgatgtagttcaagatgtctgagacatactgttcctcagggtattccgtggtgtcaagaggaactttatagagtttgctgaagaaagattccgggtggagggccacagctgctcccacacagctgagggccagggccttcacgctgaccctcacatccctgtccggaaccagcacattttttccccctgttagcaaaaacgaagcagataaaaggcggacacaatggacaagaggtgcagagtcatcatcagtggactgtccaatgtcacctttgatgcggcaaggcttgttttcttgatcacccggttcagtagcttcatctctcaacacaaatttatcaacactgctgtcagaaggctgcctgcagtgactcatgtttttcaataaatgtgcctgttgaagggccatggaagagttcctgaaggcctccgaggcttcatcaggaagaatacctgtggcttcctcatcttcatcctggggctgtccaatctgcaggcccaaatactggttgtcggtaccgtctaacacaatttcagaactgtctgaaggggtaacagctgaatcaggcccttcggtggtggtctgggagctgtcgctgatgggcgacgaggcctgggtcccatcattcaggtccatggcagggtcagatgggacggcgctgacctggctggagctgtggctcaagatatcctcctcatccccatcagtggcagagcttgtcaagtcacagctggccagatccactgagtccgcctgcagtgtgtgctgtgaccgtggctgttctgtgatgatgtcatgacctgctgaccctggagtggaaacccctgaagaagcagccagctctccactgatctcatccttcactgaggctgttaaggcagagctgctgacatccgatctcgattcagagtcatcctccaaggcttcttcttctcctaagagcactttgcctttttgttttcttgaaaggacagggctgcatgaggaaccccctccagctataagttccacaatactcccactacggcttcggccaccagactcctccttagcagcggtgagctgcccaatgcccccgactgcggtcagggtttgcagaagctcgggtggaggcgttctgaagagctgctgcaacagctccagggctccggtcacaacattgtggtcttggtgctgtgtatgatgtaacgtcagttcataaacctggacaagctgctctgcagaaggagagacttccatttctttccttgtcactccgaagctgcctttcaggcttgtgtccttgacctgctgctgcagcaagggcaccaaatacctcagggtgagcagcacgccaagaatcagcagagtggagtgttcatcctcgacaggaacgagtaagcctaagagcacatttagtagccaactatagaaatattgtgtccttcttgagtgctggcagatgctcactgctgatccagccgctgtccgccgaatggtgggggagcttgacttcaggttcgctatgaaggcctttaacaaaaccttaatttcattgtcatttgcaaaattgccaaaagaagccataattttgggaacagctgcagccaaggtctcctggactgattcttcgggtctcttgcttgttcgagtcaggcacggcagaaggttcaccaggtaaggcctgcatttctgaggccgaaccaggtgagccagctcagcaaacctccacagggcagcacgcaaactccgaggggcaccattctttttaatttccttatagagctcgagctgtaaccttggaagattagaatccatcaaagctttgataactttgttgaggcattcgtcagccaccatcctgacatctgactctgcgtcatcactgcacagcagaaaaagttccatagcgatgcccagaagtttctgaaattctggagaatttctgacagactgtgccactatgttttcacatattgtcagacaatgattcacacggtctttcttggtagctgaaagttctttctttggtcggtgcagcggctcctcagccacagccgggccgggtggcggcgggggcggcggcgggggcggctgcggctgaggcagcagcggctgtgcctgcggcggcggctgaggaagctgaggaggcggcggcggcggcggcggcggtggcggctgttgctgctgctgctgctgctgctgctgctgctgctgctgctgctgctgctgctgctgctgctgctggaaggacttgagggactcgaaggccttcatcagcttttccagggtcgccatggcggtctcccgcccggcacggcagtccccggaggcctcgggccgactcgcggcgccgctcagcaccggggcaatgaatggggctctgggccgcaggtaaaagcagaacctgagcggccgtccatcttggacccgtcccggcagc

SEQ ID NO: 7 - DNA, 13237 bp, Mus musculus
  source 1..13237: mol_type = genomic DNA
ttttttttttttttttttaacagcaacaacaggtggtttaatcgcttctttaattcaactgtacaatatctgcaatttaaaaattttaaatatacatttcatgtcagtccttccttttggaaatggacagccaggtctaggctgggctccggggcacacccatcacagccctcctagttcccagtgaagcccatggcatacagcagcaaggcttggacaggagccccctagaatgcagccaaatctctgcagataggtctctgccacctattatcttacacccagcttgcggcagagggtgtttccagagacacttgaggggagcagttccttcgatggctctagagtgtgacaagcacacatggagggtggccctgaaccttgatatcatctttagttgtcacactgctcagcattggttcttctttcctggaggctccagacccactgaggaacaattcttttcccaaccatgatatcctgagcccacacccagcatcagcagctcagtgtcttcgactcccacataccaatccctggaggacagcttcatgcctgtcctggtagcagccatgatcctagtgctcaatgctgagggagggagggagggacggagggagggagggagggagggagggaaggagggagggaaggagactgtgtggggaaggatgctcacaggtggcaaggagaccaattctgcagccccacaatgggaggcaagactccttgtgacgtggctgtgagacaagctattgctgtataaaacctgtcccatgagccggaagcagagctgcttcactcactcacgggaaggtacttcctgccagggaaggcacctgttaggattggtcccttccctggcactgcattctacagggcaggaggtggttccactccagttcttccctcctgaagggtacatgtgcagacaaaatgagagaaccataaagggcacttggcagtggctaagtcacctacatgtcaagggggccatcagtgggagggagggaggcacattttggagaagaaacatgctgaagtgcattgccaaaagttctaccctggttttattaaaatctttcctgacagtaccaccatggaaacagaaacaacatcccacctcctacccctaaaacctcatagtcaaaataacttttgtttttaaataaagcttggaaatctttagatttttgaggaatttgataaaaagttttagtccctcctgcagttagacaggtggggcaatgtctccagtgagactttaatgagctatggacttttaaaaattgagtcccattctcagatgctagactcacaaagctgactgtatgtggcagttgcaagaaaagtctgctttcagaaaaaacaggcaggcatttttagaggccttgcatatgtctttgaggattgtgtgtgtgtttatgtgtgtacacaaatacatacctgcctgtacccaggtgcatctctaggttgtggcacccatgagcagacaacaactttgtggcagaggctgtccttgccccatactaagaattgtttctgatcacactaaacaagaggccaactaaacttgaggttgagctcactgatataatcccctggtgaatggctctagattttatattgagtttccttatgaacatctaccatgaggagtaatcaggcctgcaccatgctcatctcagagcggttggaccaacctcagagtgtggcagcagcactgtaagaactttcacatggtccccgagcacttctaggcgggaaattgagggtgacaagaagaagccctaaatcagcaaaggggcattggtgaatttctttcattaaaattcagtagcttcccttaacgtcctcttgaaagacctaatccatgtccactgttcctgttaccacgccttggggtggtttttgccagggcagataggaggagagtcaggccaagtgtgaggctccccacaacctgtgtttggtagggaaccttgcatcccagcagcaaggctacttgtcatgatggaaagatagagggaaattcaagggtctcaagaaagcaatccatggactgaagcacagttagttaatcacaggctgcaagctctttcctcctgtgtagcctagaaacatctccaaactattccactcccctactctacagctgagaaatacagatatgacttagcggaacagcagaaaatctgcttggtcatatagtcaaacagcaaacagagttcccaaaccaagccaggaaatgaaggtagctcattttcattaacatgacctggttactctgggcttgggctttgggaagaggtggctctgaccagcatgggaagctgtctgaggccagaggctgacctgattttgaaccttccctttggtgcctcatcttgtcagctgagtcctccctgggctctgacaggcataggtctgtactctactgggctgacagaaggcaagatgggaaggggcaaaagaggctctgggtccattcttaactgttgctaggacaccaagctttcccttgactatgagaaactgagacaaaccaacaaaccatagctcagagacacctttggggtaatcaggtcagcacttctcaggtcccaaccatgcagaagatacaaagggacagacagcatccacaatggtcagctggtgtgtgggcaggctacagtgcaggtcagccacaaccagggatgaggttattgggatagccactttgggtccagcagatgctgtttctacccaggctgagagactaggagagtgcatcaacaccagggaggagatagcttgacagtcatgcctgggaaggggagaggagggcagctgccacagggcaagcctcttataactctaacagtggaagtcagtttttcagttcctcagttaggccacaggcaggattctcacacaggcagtcaataccaacacctctctctgtgctggcttaatggaatgcataagaaaagggagctgtatgaagtgcaagtgccacagggtgttgggagggctacaggagggacctgcccgactagactgagtagctacaggagagggagtggcggccagaaggcccctccacttccataaactttgtcacatgcagcacaggccttgccaagtcacacactttacacgggcataggaaaagttacattaaaattaatctctttactgatataattaaattttaactcctgagaagaaaacacagaaaggaaaatggtgctggacacctggcagccccagttcccagccccacacaccattcattttgtgtccagacactggtgtggcaggtatgcctactgggtaaatgtgggagggagctctccagcccagtggagcaggcgggctcagaaccatctggcaagagctaggacttctgatccacataccagggcagctgcaacctggcgactatggccaggggaacactaggaaaaagacaaacacctggtcaacctagcactgtcaccagctgcagcgaggccaggacccaggactcaggctcaaccccaacatagtgcatgttccctgcatagccctcattgcaaagcactcctgccattgcctggctgtccacttgacacaagtggaagcctgcacggccaaggcagccccagcagaagcttggagcaggctcctggaggctcaggccccagcagctgccttctttcagccttttgtcccacaggcactactcagcaggtggtgaccttgtgaacattttgcaaacaagcaagcagcctgtggtatggacttcctggtgcagccaccacctcaaacacagactggaaagccctgcggtcgaattcctcctctatctggtgtctgtagaagtctgtggcaaccaggcagaaaaggttcacatccacctgttccagtttgcccatcctgctgatgacatgtggaaggatcgcagaaacccatgggctggtagatgcgctaacaaggaagcaggagaggctccacatggccatggcaactggagttctttgtgtgaagttggacagggacagcatgacccagtcccggaccatggatgactgcccagcactgtgcagagtctgaaaaaccttgtaaactacagtggccatgaactgtgggtatggctgctgattggacaggaactctccaatgactttgttcatgacatcttgaggtggaaagaagtcatctaggaactgaggcaggatccttgccacaaccctggcttcacagggaaatcccttgcggatcctatcaaagagaacagacactcgctccatagctacaatcacagactcgctgtcaggtgtagcagggctggggtcagaagctctgcctggactggctttttcctttcctgtgtacatgcaggtgagcatcaggcctagggctgccatggccctgtgtgggctttgtacattcactctgtccacacttagcttgaccaaggactctgtgtctagccgagatagctgctcagacagcaggagccgctccagaccccggagggcacagtggtaaatgatggagggggtggactcctcacttccagacagcattactccacacatctgtatcacagatgctgaaaattctggtcccacatccagagggtagttttccatcaggtagaaagcagtggcacacattaccagcacatgctgctggctgtgaatgttcacgcagtgggctattcctttgaggttggacagcagatagtcactaacaactggaatgagctgctttgcagtgtcatccaagaggtcacactccaacacatagaggatgccgtgcagggctccgatctggctgggcaggtggctgctcctcagtgtgctctccagtaggcggctgactggctctgccacagttttgtccattccaaggacagcagctgccttacaggtggcaggcaccaggtactgaatgaggatctcatcttctgaagggtgcactctccgtagttctgtcagcgtcagatacatcatttcaaactgggtacgttcggtgaataagtctgacactacaagaagagatcgaaccacttcactgatcaggatgacgggggtccttctggctgcactggatggcaggatccatcggctgtacaattcaagcagaaactgcgaacaggagtgaatatcaaccccggcacggtgttttctggaattgactggagacacaggtggtgacgttggtgcagggacatcactttcttcctcttcttcctcatcccattcctcctctctcaggggtgtgatgttatttcccagccacacggagtgtatggacacctggcccagcttgtagctcatgttgcctggctcccgctctgggttgatctgcagcagcagcttgtcatggctgataagagcacctgtagtagctggtaacagagaagggacaggatcccacgcctggtgagaatggtgagtggcagtattctctctctgggaaaccatctcttggatttcttgttctacaatccctctgatcatgctcagctttcttccaaatctggtatcgagagccttcagtggcttgttccggggctgttgctccaagcagcttacagctggattgccagccacaggcacggtcattgcactgagcactagagaggtgatggcctgcacagccaggacatggatctgggttctttctgtgtcttcctctggtgggctctcttcctgttccatcaccaggggctgagtcaccaggacaccaaggagggtggcccaagtttcttcgaactgggtacgattggtccaccctagggtgttgatgcggtagatgaactccttgaggatctccttctcctggaggaactctacagggatctcaggaaacactgtgccaaaatcccctccaggcttgggtgaccacccgagtttccataccagaggaggcacacgagtatagctgttaactagggggagtcgggccagactgataacaatgttcttcagcacagctgtgagaaatgaaggcagggtgctgttcctcttgtggcccaaggccagcactgactgcagggattccaccatgtctgccaccatctcgcaggccgaagtgacatgactgaggttttgtatatctgagtctacttcctcctttctgacagctcttggagtatgtgacctgctttcaggaccgagaagctggtctccaggttgtactgcaatggcttccaggatgaatcgcacacaatggatgagggagcaggcatgagtcacgtactctggggaggacagcaccccccagaggccaggcacctgtagtgccaggcagcagcagtctagcccggcttggaggtccagactcagtgggatctgctcatggatcaaatgccatgacagggcctcaactgtcattaccacaaacttcaccgtgtccccctccttctcaggaggaaggtgcaaatgagcaggcactttggagagcaccaccaggtactgtgccagggcacgggcaagtatggtcagagactggtatgatgtggtatcaccaagcagatcattcaacttgttccagtaggccgtgggctctataggcaggaagggctggaagacttgatggacagcaggaagctgctgaacaacactggtcacccggttcagaatcaccccacgggctgcttcaaagaggggactcttttggccattagcaatctcgctcatgccaaggcttaaacagggagccaaaaggcttaggttgaactccgagctcatcatgaagtcattcatatcttcagcagggatacggttgaccagctctgcaccttccagcagtgcagaatctgatctggtccaacactgggatctgacaagctggaggtaccagtctttgtctggactcactgtttccagagatgtgtgcccatccccatccagtgggtgggaagtgactgggggcaaggggctaagtgagtcctgcacagtagagagtcggaatctgtccagcagtgaatagagcctttggtgtctttgtgcaagcccactgttctggaggtgttcttggattctgtttagttcctcctctggcaactgggccatgctgctctgtaaatttgcagccaaaagcatttctacccggcgacaggccagggtgtcgaccatgcgagccagcgcacggaagggggtgcccaggagcctgtccacatatagtgtgagcacagcaccagactggctgagatggatgccttccaagcactgaagtgttttcttcagagtggttggcgttgaaagattttcacagcgagactgaattgcctggataaaaagaccactagctgcagaattacgatgaatggcactaataaagtcttgtactggaggctcatgagacaagctgatcagatcttgaatgtgattcacaatgagccatgttaagtgttctgagtcatggagattctgacagacataatcacagaagagaataagggcccctcttcgcactatttctctattgcacattcccagctgagctgccgagccagaatcctcctcttcgccagacttctgggggttaagtgacttcgtgcaggacagactgtgtctcttgggtgtctgctgcacctctgcccaccaccggtggtcagtgtggttgatgagaagtaggatctgacaccagagcagtaccagggctgggtgcgtgggcaccatggatcggacccgtgcattcaggctctctagagtatagaagctgccttcacagccatcactggtgaagagtctagtggcagctgctgtgattctccggaacattccagatttgaatatgtggatcagacacatgagcagtgtgcctagctcttggcagtagaacgtatgctgctgttcactcatgtccactttgagctgttttgtaacgatgtcttctagaagaataccaaccagctgtaaaagaaaccttgagaatgtatcttctggcaaactcttttgtttcccttcgctgcattctcctagtgttacattaccgcctccaccccttaacctgttaatcactggacaggagagcaagtgtggagagaaggagagctcctgaatacgacaaagaacaatgtcctcggttgactgggaaatgagaaccctcagaatggcgaggattccagatatccacagctgcacagtgcttacagatgccattgtgcttggagtgatgaacatactccgcaaaagcatgtccacaggacgtagggaggaaggagccaaaatctcaaacaaggtatttaacactccaagggcttcatgagagtcaatatgcatctgctgcttggccaacatgggcaggatgatgtctgcgacctgccgagagagccgtttccacttgtcctcattctccttgtggcactgctgcaggacaaggatgaacatctccagcacctgatggtactggatgagtcgtaacagcatggagaccaccacctccttctgtgtctcaagctctttccctgcatcagctttatttgttcctcgtaacacaaagaggtcatggacaatgggctgcagagcaggtatagcatgtgtaacggccttccttccactggccatgatgccatcacacagctggatgattttaggaattccaatgatctgttttgaatggtagcgctcataagacagtaataccaggaagaaaaatatatttggaataattgcctctgattccctgaactggcccacttcaatgtactcaaactgcttcagcacaaacccgatgaacacctggtctgaatccagtagacagtaattgacccgtagctgaaccagctgtgccagcaaatccaaaacctgcttctgcaattgtacagatgttgtcgtggtgtactgcttcaatgcttttataacaagaggctcaaataacctaatgtgattatgaatagcattcttatctgcacggttctttgtgacgcttgttaggttcgtcttcaattgggcagacactttctggagtacatcaaaccaccccgaggcatcacgctcctgctccgcctgcaccatgttcctcaggcttgcgtcagccaaggcctgtgtgaagtgcgtgtatggtgccatgaagcagtagtgatataagccgggcctcacacttgaagagccaaggcgctgagctcggcactgagacttgctggggttggaagataagccatcaaactgtgaggctaagtttgtcccaaagagagtcttcaatagctgctgcacacagacagttgccatcattggttctcgactaaagcaggatttcaggtatccaaggacctcttcaacacactttccaatgtcctgcagtgtcgccagctctagaatctgagaaaggacgtccaaggcagagcgcaggaaccccccaaacttttcagtgctgttctgaagatctaaggtgaccttatagttggcgtgagtggctttcaggacatcatgcagtttgaggtaggaggggagatggtagaaactccccagtgaggatgatttacttgctgtgacaggtcctgaggtgtctgattgtcgagaggctgcactggcctcaccaactttcttgggactcattggagtagaagcttgttctccaggttctttctccttccctttccgtcgaataggacttagagaaggggggtttgttagagaaggcaaggctgccttgattgctggtccaggagtcacatcgtccaagacatgagcacagatattgatcaccttcagcaggtgggagaaaagctgctccaccaagggcactagagtccgatcccccagagcaggccagatttcctcctgtctggtggctgctgagttggcttcttcttcagaggtccatgaacttctcagagacttgggggcactcgctgctagcaagtttccagccaaaatcaaggcatcctgatgggctgagagatccagtgggaaccaagctgatgaaagcaaggtgagaatcatggaggccatcccaacagtgcagctcttcctggactcatcagaggcactcagtgggggcactccacagtgccatcctaaactccaagtgcaaactggaaaggctgctgagagaagacacaaggcttcacagcatccaaatgtgagtgcccgtgttgttgacgtaatgagttcatgagaaactgcggcaacaactcttgagagattgttttccatggtgacatctgttatacttggcagtaagctatagcctctatagattctggtgatggtgctgacagaaaagtgtgatggtggctgggtctcatgcatgaggagcttcaggtagacactgctctgatccctcgctacagccacaactggatcagcttgtccttggtcacacttgtaaaacagctttgggacaagccttgttaatgatgttgcagcaacatgtcgaaccctggggtcttcatctccaagcaaataaatgaccacattattgagtactcgttcttgtagttttagaaaccctgtataatgatgagcccctcggtgtaaactttctgcttttgcctccaaaaaactcacgagcctgaagtcaatctctgccagagtgtccagcagttcggtcctcaccagccagtaggagctgttcttcagaggcagcatatcaataagcagttgtaatcccaagtcactgtagctgctgctgcaaagactcaggacacagtgcctcacagctgtacaagccaacttgcaagtaacagaagattcatccttcaacgttttctgcagtaaaggaatgcagtccaccagagaaaatgtatttcctgtcagggttctgatgttgcccagccagtcaccaacacggagacgggacctactgaggatggagtagacaagggtcccacagagaatggcagtagctcctcggacctgtgggtctccatgatcgatgtagttcaagatgtcagaaacatactgttcctcagtactttccgtggtattaagaggtactttgtacagtctgctgaagaacgactctggatgaagggccacagccgcaccaatgcagctgagggccagggccttcacactgactctcacgtctctgtctggaaccagtgctttcttttcaccagttaacaaaaaggaagcagataaaagacggacacaatgtaccagaggagcagaatcatcatcattaggctgtcctatgtcacctttgattcggcaaggcttgctttctggatcactggcttcagcaacctcatctcttgttacatacttatctatactgctgtcggaaggctgcctgctatggcccattctttccaacaagtgtgcctgttgaagggccagagaagagtttctgaaaacatctgagacttcaccagaaagaacacctgcagctccctcctcatcgtcctcctgtggctgtcctatctgcatgcctaaatactggctatcggcaccatctaacacaatttcagaactgtccgaaggagtcacagctgaatcaggtccttcagtggtggtctgagaactgtcactgatgggtgaggaggcctgggtcccatcattcaggtccatggcagggtcggatgggacagcactgaactggctggagctgtggctcaagatgtcctcctcatccccatcagtagcagcactggtcaggtcacagccggacaaatccacagagtctgcttgaagtgtgtgctgggatctaggctgctcagtgatgatgtcgtgaccaacagaaccaggagtggaaacacctgaagaagcagcgagctctccaccaatctcactcttcacagaggctgcaaaggctgagctgctgacatctgacctggactccgagtcatcttccaaggcttcttcctctcctaagagcactttgcctttctgctttcttgagaggacagggctgcacgaggaaccccctccagctaaaagctccacgatgctcccgctgcggcctcggccccgggcctcttcttgaaccagagtgagctgcccaagccctcctggtgtggtcagtgcttgcaggagttcaggtggaggggtacggaagagctgctgcaggagctccagtgcccctgtcaccacattgtggtcttggtgctgagtatgatgcaaagtcagttcataaacctggacaagctgctctgtagaaggagagacttccatttctttccgtgtcaccccaaagctgccttttagacttgtgtccttgacctgctgctggagcaagggcactagacacctcaatgtgagcaacacaccgaggatcaggagagtggagtgctcttcttccatgggaaccagcagacctaggaggacattaaggagccagttgtagaagtactgtgtcctcctagaatgttggcagatgctcacggctgagccggctgctgtccgccgcacggtgggagagcttgacttcagatttgctatgaaagctttcaacagaaccttaatttcattgtcatttgcgaaattgccaaaagaagccataattttaggaacagctgcagccaaggtctcctgaactgattcctccggtcttttgcttgttcgggtcaggcatggaagaagattcaccaggtaaggcctgcacttctgaggtcgaaccaggtgagccagctcagcaaacctccacagggcagcacgcaaacttcgaggagcaccattctttttaatttccttatagagttctaactgtagccttggaagattagaatccatcaaagctttgatgactttgttgaggcactcatcagccaccattctgacatctgactccgcatcgtcactgcacagcagaaacagttccatagcgatgcccaagagtttctgaaattctggagaatttctgagagactgtgccacaatgttttcacatattgttagacaatgattcacacggtctttcttggtggctgagagttccttctttggtcggtgcagcggttcctctgccggacctggcagcggcggtggtggcggcggcggctgcccctgaggcggcggctgagggggttgaggcggaggcggcggcggcggtggcggcggcgcctgcggcggtggctgctgctgctgttgctgctgaaacgacttgagcgactcgaaagccttcatcagcttttccagggttgccatgacggcttcctgcccgatgggacagaccctgaagacttggagcctactggcactacgcggcgccacttagcagcaaggcaatgaatggggctctgcgcggcaggcagaagcggaaccaaggcgctcagccatcttgggcccgtcccggcaaccctcgcggcgagtgc

SEQ ID NO: 8 - DNA, 13189 bp, Rattus norvegicus
  source 1..13189: mol_type = genomic DNA
aacagcaacaacgggtagtttaattgcttctttaattcaaatgtacaatatctgcaatttaaaaattttaaatatacatttcatgtcagtccttcctcttggaaatggacggccaggtctaggctgggctccggggcatacccatcacagccctcctagttcccagtgaagcccatggcatacagcagcaaggcctggacaggagccccctagaatgcaggcaaatctctgcagataggtgtctgtcaccttacacccagcttgtggcagagggtgtttccggacacttgaggggagcagttccttcgatggctctaaagtgtgacaagcacacatggaggtggccctgaaccttcatgtcatcttcagttgtcacactgctcggcattggttcttctttcctggaggctccagacccactgaggaacagttctcttccaaaccgtgatatcctgagcccccacccagcctcagcagctctcagggtcttctactcccacataccaatccctggaagacagcttcgtgcctgtcctggcagcagccatgatcctagtgctcaccgttgagggagggagggagggagggaggcaggcaggcagtggggaaggatgctcacgagaggcaggaggagactaattctgcagccctacaatgggaggcaggactccttgccaggtggctgtgagccaagctattgctgtataaaccctgtcccatgagctgaaagcagagctgcctcactcacaggaaggtacttcctgccagggagggcacccgttagggtcagtgccttccctggcaccgcagtctacagggcaggaggtggttccactctagtccttccctcctgaagggtacatgtgcagacaaaatgagagaatagtaaagggcacttggcagtggcaaagtcacctaatgtcaaggggccatcagtgggagggaggcacattttggagaagaaacatacttaagtgcattgccaaatagttctaccctggttttactaaaatctttcctgataataccagcaggaaaacagaaacaacatcccacctcctacccccaaaacctcacagtcaaaattacttttttttttttaaataaagtttggaaatccatagatttttgaggaatttgataaaaagttttagttcttcctacagttagacaggtggggcaatgtcttcagtgggactttaatgactatggacttttaaaaattgagtcccattctcagatgctagactcacaaagctgactgtatgtggcagttacaagaaaagtctgctttcaggaagaatggacaggcatttttagaggtcttgcatatgtctttgaggtgtgtgtgtgtgtgtgtgtgtgtgtgtgtgcgtgtgtgcgtgtgtgcctgtgcccaggtgcatctctaggttgcagcacccatgagcagacaacagctttgtagcagaggctgttcttgtcccatactaagagttatttctgaccacactgaacaagagaccaactaaactggaagtcactgatataaaccccaggtgaatggctctagattttatattctgttttcttatgaacatctaccatgaggagtaatcggtaatcaggcctgcaacatgctcatctcagagctgttggaccaactttagagtgtggcagcagcattgtgagaactttcatgtggtctccaagcacttctaggagggatatctagggtaacaagtagaaaccctaaatcagcaaaggggcattggtgactttctttcattaaaattcagtagcttcctttaaggtcctcttgaaagacctgatccatgtccactgttcctgttaccatgacaccaggatgggctgggctggcttgcagtggcctttgccagggcagataggaatagaatcaggccaagtgtgaggctccccacaacctgtgtacctgtgtttggtagggaaccttgcatcccggcagccttttaatcatcatgatgggaaaacagaaggaaattcttaagaaagcagtccacagactgaagcacagttaattagtcataggctgcaagctctttcctcccgtgtagcctagaaacagctccaaattactcctctccccactctgcagtcgattggtacagacaggactgagtgggcagcagagagcccgctcagtcacacagccagcagagctcctggaccaagccaggggacgaaggcagcctgtgtccagggctcattctcatcaacatgtcctggctactctgggcttgggccttgggaagaggcggctctgaccagcagcacgggaagctgtctgaggccataggctgacctgattttgaaccttccctttggtgcctcatcttgtcaggccgagtcctcccttggctctgaaaggcataggtctgtactgtaagggctgacagaaggcaagatgggaaggggcaaaagaggctctggttccattcttaattgttgctaggacattgagctttcccttgaccaagagaaacggagacaaccaacaagccatagctcagagacacctttggggtgatcgggctagcattcctcaggtcccaaccatgcagaagatacaaagggacagagagcatccacaatggtcagccggtgtctgggcaggctacagcccaggtcagccacgaccagggatgagattattgaaatagcctctttgggtccagcagatgctgtctctgcccaggctgagagactaggagagtgcatcaacactagtgagtagacagcttgatagtcatgcctggggtaggggtgggggtctgccgcagggcaagcctctcttaatcctaagtggaagtcagtctcataagctgggccacaagcaggattctcacatagggcagttaacaccaacaccactctgtgctagtcaaatggaatgcataagaaaaaggagccgtgtgaagtgcaagtgccatagggtgttgggagggctacatgagggacctgcccgactagactgagtagctacaggagagagagtggtggccagaaggcgcatccacttccataaactttgtcacatgcagcacaggccttgccaagtcacacactttacacgggcataggaagagttacattaaaattaatctctttactgatataattaaattttaactcctgagaagaaaacagagaaagggaaaatgatgctggacacctggcagtcccagttcccagcccccacaccattcactttgtgtccagacactggtgtggcaggtacacctgctgggtaaatgtgggagggagctctccagcccagtgggacaggggggctcagaaccatcttacaagagctcggattctgttccacataccagggcagctgcaacctggcaactatggccagggcaacactaagaaaaagacaaacacctggtcaacctagcactgccaccagctgcagtgatgccaggacccaggactcaggctcaaccccaacatagtgcatgttccctgcatagctctcattgcaaagcactcctgccattgcctggctgtccacttgacacaagtggaagcctgcacgtccaaggcagccttagcagaagcttggtgcaggcccctggaggctgtagccacagcagttgcctcctctcagcctcttgttccacaggtactactcagcaggcggtgaccttgtgaacattttgcaaacaagcaagcagcctgtggtatggacttcctggtgctgccaccacctcaaacacagactggaaagccctgcggtcgaattcctcctctatctggtgtctgtagaagtctgtggcaaccaggcagaaaaggttcacatccacctgctccagtttgcccatcctgctgatgacgtgtggaaggattgcagaaacccatgggctggtagatgcactgacaaggaagcaggagaggctccacatggccatggcaactggagttctttgtgtgaagttggacagagacagcataacccagtcccggaccatggatgactgcccagcactgtgcagagtctgaaaaaccttgtatactacagtggccatgaactgtgggtatggctgctggttggacaggaactctccaatgactttgttcatgacatcttgaggtggaaagaagtcatctagaaactgaggcaggatccttgccacgaccctggcttcacagggaaatcccttgcggatcctgtcaaagagcacagacactcgctccatagctacaatcacagactcgctgtcaggggtagcagggctggggtcagaagctctgcctggactggctttttcctttcctgtgtacatgcaggtaagcatcaggcctagggctgccatggccctgtgtgggctttgtacattcactctgtccacacttagcttgaccaaggactccgtgtctagccgagagagctgctcagacagcaggagccgttccagaccccggagggcacagtggtaaatgatggagggggtggactcctcacttccagacagcattactccacacatctgtatcacagatgctgagaattctggccccacatccagagggtagttttccatcaggtagaatgcagtggcacacatcaccagcacatgctgctggctgtgaatgttcacgcagtgggctattcctttgaggttggacagcagatagtcactaacaactggaatgagctgctttacagtgtcatccaagaggtcacactccaacacatagaggatgccatgcagggctccgatctggctgggcaggtgggtgctcctgagtgtgctctccagtaggcggctgaccggctctgccacagttttgtccattccaagaacagcagctgccttacaggtggcaggcaccaggtattgaatgaggatctcatcttctgaagggtgcactctccgtagttctgtcagcgtcagatacatcatttcaaactgggtacgttcagtgaataagtctgacaccacaagaagagatcgaaccacttcactgatcaggatgacaggggtccttctggctgcactggatggcaggatccaacggctgtataattcaagcagaaactgcgaacaggagtgaatatcaaccccagcacggtgttttctggaattgactggagacacaggtggtgatgttggcgcaggggcatccgcttcttcctcctcctcctcatcccattcctcctctctcaggggtgtgatgttgttccccagccacacggagtgtatggacacctggcccagcttgtagctcatgttgcctggctcccgctctgagttgatctgcagcagcagcttgtcatggctgataagagcacctgtagtagctggtaacagagaagggacaggatcccatgcctggtgagaatgatgagtggcagtattctctctttgggaaaccatctcttggatttcttgttctacaatccctctgatcatgctcaactttcttccaaatctggtatcgagagccttcagtggcttgttccggggctgttgctccaagcagcttacagctggattgccagccacaggcacagccattgcgctgagcactagagaggtgatggcctgtacagccaggacgtggatctgggtcctttcggtgtcttcctctggtgggctctcttcctgttccatcaccaagggctgagtcaccaggacaccaaggagggtggcccaagtttcttcgaattgagtacgactggtccaccctagggtgttgatgcggtagatgaactccttgaggacctccttctcctggaggaactctacagggatctcaggaaacactgtgccgaaatcccctccaggcttgggtgaccacccgagtttccataccagaggaggcacacgagtatagctgttaacgagggggaggcgggccagactgacaacaatgttcttcagcacagctgtgagaaatgaaggtagggtgctgttcctcttgtggcccagggccagcaccgactgcagggattccaccatgtctgccaccatctcgcaggccgaagtgatgtgactgaggttttgtatatctgagtctacttcctcctttctgacagcccttggagtatgtgacctgctttccggaccaagaagttggtctccaggttgtactgcaatggcttccaggatgaatcgcacacagtggataagggagcaagtatgagtcacgtactctggggaggacagcaccccccagaggccaggcacctgcagtgccaggcagcagcagtctaggccggcttggaggtccagactcagtgggatctgctcatggatcaaatgccatgacagggcctcaagtgtcattaccacaaacttcaccgtgtgcccctccttctcaggaggaaggtgcaaaggagcaggcactttggagagcaccaccaggtactgtgccagggcacgggcaagtgtggtcagagactggtatgatgtggtatcaccaaagagatcattcagcttgctccagtaggctgtgggttctgtaggcaggaaaggctggaagacttgatggactgcaggcagctgctgaaccacattggtcacccggtccagagtcaccctacgagccgcttcaaaaaggggactcttttggccattagcaatctcgctcatgccaaggcttaagcagggagccaaaaggcttaggttgaactccgagctcatcatgaagtcactcatatcttcagcagggatacggttcaccagctctgcaccttccagcagtgcagaatctgacctggtccaacactgggatctgacaagctggaggtaccagtctttgtccggattcactgtttccagggatgtgtgcccatccccatccagagggtgggaagtgactgggggcaaggggctaagtgagtcctgcacagtagagagtcggaatctgtccagcagtgaatagagcctttggtgtctttgtgcaagcccagtgttctggaggtgttcctggattctgttcagttcctcctctggcaactgggccatgctgctctgtaaatttgcagccaaaagcatttctactcggcgacaggccagggtgtcgaccatgcgagccagcgcacggaaaggggtgcccagtagcctgtccacatacagtgtgagcacagcaccagactggctgagatggatgccttccaagcactgaagtgttttcttcagagtggttggagttgaaagattttcacagcgagactgaattgcctggataaaaagaccactagctgcagaattacgatgaatggcactaataaagtcttgaactggaggctcgtgggacaagctgatcagatcttgaatgtgattcacaatgagccatgttaagtgttctgagtcatggagattctgacagacataatcacagaagagaataagggcccctcttcgtactatttctctattgcacattccaagctgagctgctgagccagaatcctcttcagcagatatctgggggtttagtgacttcgtgcaggacagactgtgtctcttgggcgtctgctgcacctcggcccaccatcggtggtcagtgtggttgatgagcagtaggatctgacaccagagcagtaccagagctgggtgtgtgggcaccatggctcgcacccgtgcattcaggctatctagagtatagaagctgccttcacagccatcactggtgaagagtctagtggcagcggctgtgattctccggaacattccagatttgaatatgtggatcagacacatgagcagtgtgccgagctcttggcaatagaatgtatgctgctgttcactcatgtccactttgagctgttttgtaacaatgtcttccagaagaataccaaccagctgtaagagaaaccttgagaatgtatcttctggcaaattctttacttgtttcccttcactgcgttctcctagtgttggattactgtctccatcccttaacctgttaattactggacaggaaattaaatatggagagaaggagagctcctgaatacgagaaagaacaatgtcttcggttgactgggaaatgagaaccctcagaatggctaggattccagatatccacagctgcacagtgcttacagatgccattgtgcttggagtgatgaacatactccgcaaaagcatgtccacaggacgtagggaggaaggagccaaaatctcaaacaaggtatttaatactccaagggcttcatgagagtcaatatgcatctgctgcttggctaacatgggcaggatgatgtctgcgacctgccgagagagccgtttccacttgtcctcattctctttgtggcactgctgcaggacgaggatgaacatctctagcacctgatggtactggatgagtcgtaacagcattgagaccaccacctccttctgggtttcaagctctttccctgcatcagctttatttgttcctcttaacacaaagaggtcatggacaatgggctgcagcgcaggaatagcatgtgtgacagccttccttccactggccatgatgccatcacacagctggatgattttaggaattccaatgatctgttttgaatggtagcgctcataagataatagtaccaggaagaaaaatatatttggaataattgcctctgattccctgaactggcccacttcaatgtactcaaactgcttcagcacaaacccgatgaacacctgatctgaatccagtagacagtaattgacccgtagctgaaccagctgtgccagcaaatccaaaacctgcttctgcagttgtactgatgttgtcgtggtgtactgcttcaatgcttttataacaagaggctcaaataacctaatgtggttatgaatagcgttcttatctgcacggttctttgtgacacttgtaaggttcgtcttcaactgagcagacactttctggagtacatcaaaccaccctgaggcatcgtgctcctggtccgcctgtaccatgttcctcaggctggcatcagccaaagcctgcgtgaagtgcgtgtatggtgccatgaagcagtagtgatataagccgggcctcacactggaagagccaaggcgctgtgctcggcactgagacttgctggggttggaagataagccatcaaactgtgaggctaagtttgtcccaaagagagtcttcaatagctgctgaacacagacagtcgccatcattggttctcgactaaagcaggatttcaagtatccaaggacctcttcaacacactttccaatgtcctgcagtgtcgccagctctagaatctgagaaaggacgtccaaggcagagcgcaggaaccccccaaacttttcagtgctgttctgaagatctaaggtgaccttatagttggcgtgagtggctttcaggacatcatgcagtctgaggtaggaagggagatggtagaaactcccaagtgaagatgatttactcgctgtgacaggtcctgaggtgtctgactgtcgagaggctgtactggcctctccacctttcttgggactcatcggagtggatgtttgttctccgggctctttctccttccctttccgtcgaataggacttagagaaggggggtttgtgagagaaggcaaagctgccttgattgctggtccaggagtcacgtcatccaagacatgagcacagatattgatcaccttcagcaggtgggagaaaagctgctccaccatgggcaccagagtccgatcccccagggcaggccagatctcctcctgtctggtggctgctgagctgccttcttcttccgaggcccatgagcttctcagagacttgggggcactcgctgctagcaagtttccagccaaaatcaaggcatcctgatgggctgagagatccagtgggaaccaagctgatgaaagcaaggtgagaatcatggaggccatcccaacagtgcagctcttcctggactcatcagaggcactcagtgggggcactccacagtgccatcctagactccaagtgcaaactggaaaggcggctgaaagaacacacaaggcttcacagcacccaaatgtgagtgcccgtgtagttgacgtaatgagttcatgagaaactgcggcaacgactcttgagaggttgttttccatggtgacatctgttacacttggtagtaagctgtagcctctatagattctggttatggtgctgacggagaagtgggatggtggctgggtctcatgcatgaggagcttcaggtaaacactactttgatctcttgctacagccacgactgggtcagcctgtccttggtcacacttataaaacagctttgggacaagtcttgtcaatgtcgtcgcagcaacatgtcgaaccctggggtcttcatctccaagcaaataaatgaccacattattgagtactcgttcttgtagttttagaaaccctgtataatgatgagcccctcggtgtaaactttctgcttttgcctccaaaaaactcaccagcctgaaatcaatctctgcaagagtttccagcagttcagtcctcaccagccagtaggagctgttcttcagaggcagcatgtcaataagcagttgtaatcccaagtcactgtagctgctgctgcaaagactcaggacacagtgcctcacagctgtacaagccaacttgcaagtaacagaagattcatccttcaaagttttctgcagtaaaggaatgcagtccaccagagaaaatgtatttcctgtcagggccctgatggtgcccagccagtcaccaacacggagacgggacctgctgaggatggagtagacaagggtcccacagagaatggcagtagctcctcgcacctgagggtctccatgatcgatgtagttcaggatgtcagagacatactgttcctcagtactttccatggtactgagaggtactttgtagagtttgctgaagaacgactctggatgaagggccacagctgcaccaatacagctgagggccagggccttcacactgactctcacatctctgtctggaaccagtgctttcttttcgccagttaacaaaaaggaagcggataaaagacggacacaatgtaccagaggagcagaatcatcatcattaggctgtcctatgtcacctttgattcggcaaggcttgctttctgggtccccagcttcagcaacctcatcttttgaaacaaacttatcaacactgctgtcagaaggctgccggctatgacccattctttccaacaagtgtgcctgctgaagggccagagaagagtttctgaaaacgtctgagacttcaccagaaagaacacctgcagcttcctcctcgtcttcctcctgtggctgtcctatctgcacgcctaaatactggctgtcagcaccatctaagacaatttcagaactgtcagaaggagtcacagctgaatcaggtccttcagtggtggtctgagaactgtcactgatgggtgaggaggcctgggtcccatcattcaggtccatggcagggtcggatggaacagcactgaactggctggagctgtggctcaagatgtcttcctcatctccatcagtagcagcactggtcaagtcacagcctgacaaatccacagagtctgcttgaagtgtgtgctgggatcgaggctgctcagtgatgatgtcgtgacctacagaaccgggagtggagacacccgaagaagaagcagcgagctctccaccaatctcactcttcacagaggctgcaaaggctgagctgctgacatctgacctggactccgagtcatcctccaaggcttcttcctctcctaagagcactttgcctttttgctttcttgagagaacagggctgcatgaggaaccccctccagctaaaagctccacgatactcccgctgcggcctcggcccccggcttcctctcgaaccagagtgagctgcccgagccctcctggtgtggtcagtgcttgcagcagctcaggtggaggggtacggaagagctgctgcaggagctccaatgcccctgtcaccacattatggtcttggtgctgtgtgtgatgcaaagtcagttcataaacctggacaagctgctctgcagaaggagagacttccatttctttccgtgttaccccaaagctgccctttagacttgtgtccttgacctgctgctggagcaagggcactagacacctcagtgtgagcaacacaccaaggatcaggagagtggggtggtcttcctccatgggaaccagcaaacctaggagcacattcaggagccagttgtagaagtactgtgtcctcctagagtgctggcagatactcactgctgacccagctgctgtccgccgcacagtgggagagcttgacttcagatttgctatgaaagctttcaatagaaccttaatttcattgtcattcgcgaaattgccaaaagaggccataattttaggaacagctgcagccaaagtctcctgaactgactcctccggtcgtttgcttgttcgggtcaaacatggaagaagattcaccagataaggcctgcacttctgaggtcgaaccaggtgagccagctcagcaaacctccacagagctgcacgcaaacttcgaggagcaccattctttttaatttccttatagagttctaactgtagccttggaagattagagtccatcaaagctttgatgactttgttgaggcactcatcagccaccattctgacgtctgactccgcatcgtcgctgcacagcagaaacagttccatagcaatgcccaagagtttctgaaattctggagaatttctgagagactgtgccacaatgttttcacatattgttagacagtgattcacacggtccttcttggtggctgagagttccttctttggtcggtgcagcggctcctcggccggacctggcagcggcggtggtggcggcggctgcccctgaggcggcggctgagggggttgaggcggcggcggcggcggtggtggcggcgcctgcggcggcggctgctgctgctgctgttgctgctggaacgacttgagcgactcgaaagccttcatcagtttttccagggttgccatgacggcctcctgcccgacaggacagaccctgaaggcttggagcctattcgcactacgcagcgccacttagcagcaaggtaatgaatggggctctacgaggtagaccgaagcggaaccaaagctcccagccatcttgggcccgtcccggcaaccctcgcggcgagtgc

SEQ ID NO: 9 - DNA, 13328 bp, Macaca fascicularis
  source 1..13328: mol_type = genomic DNA
tgatggtttcaatgtttttcctttaatttggatgtacaatgtttgcagcagttaaaaaaattaaatatacatctctcgtcagtccttccctttgctctcagaagcagtcaggtctgggtggggctccgggactcacccatcacagccctgctggctccaggggagctcaggctcagctgacagtccctctgaccacagcgcaaagcaatgagacctggacaaggaggccccacgtgggtcagagcccaccctccgtaggcaggtccacgttggccacaatcctccaaggctggcaatcaccacccagattgcagcgggagactctgcttttggaaacaactgaggggaaggcgttccttggactgcaccagagcgtgacaggcacacgggggaagagtggcctctgaaccttccaggttgccttcagttgtcatgcggcgctctgagcggctccctccttcccaggaggcccaggcctggcgagcgagtgtcctcttctcgcctggaccatcctgagctctccagggtgcctcggcagctctcaagatcttccttcttctcgctccctcaggtggcccctccggagcacagctccaagcctaccctggccagcagctgtggtcctgggtcctccccgcagagggaggaagtggggagggacaaagccgggtgaggatgtctgctgggcaggatgctcacaggtagcaggagcaggctgactccaccccacagacacacagaactaacctcactccgcccctcagggggaggaacttccacctgccaggcagccacagaccgagttattgctgtttactatccgtcccgagctccgtggggggctcagctcagctccaagaggacgagctgttcatcggctccgagggctctggaatgacccctccatgaaggtgggggcgggggtgtcctttagggcacagggccttctcagatgctacattctgggtgtctggaggggtttcagcttcacattttcctcctgaaaggacacgtgtgctggcagaaatgggggtggacagtaacaaagagcgcttggcagccggaaacgtcacctacacagactcagctgggcccgcagcggaagggaggcacgttttgggaaagaaacgcgcttcagtgcattgccaaacaattctaccctggtttcattaaagtctttcctgatattaccagcagcaaaacaaaagcagtctccccacagctcacccccaaaacttgacaaccaaattaatcacattttcaacaaaatttggataatatgattggtgcttgccataggttttttaggaacgcgacaaagtcttcctcccttcggcagagttgatatggagaccgttttctccggtgggatcctagtgagccatgaatgagccctgctctgaccaagccccgcgcctggacgcccgtcacacagctaactttacctggcaggtctgaggaaagtcaacttccaggaagaaccgacacgggcactcttggaggccatgcatctctgtcttgagatgtgcgtgtataaaactacagatgtgtccatatgcacgtgcacgtgtacttgacttacgcatgggtaaagtcattttactaatgagctcatattcatctctggagcacacaggcaggcctttgggagtgggggacacccactgccagagcggggtgttctgagccccttgctaaggactgttttagatcacgtcgtaaacaaaaggaagacaaactctgtgttgagcccagcgatatgcattccaaggggaatggctccgttttacattcacagtgttatttcttacaaatgtaaacatctagcagaacaacatctggcctgtgatacttctgtctccgagctgttgacataacttactgcaggggaggtgggtggggagcagcaacggttctgagaactttcccctcattcccaaagcttctagcaggctttccaggaagaagctaggatgagaaacaggagcccccaaccaatacggaagaacggtggttttcttgttaaaattcagtagcttcccttaagggcctcctcaaacatcagacccctttctaccgctcctgctgccctgccacgaggacgaggtggtcctggctgggggaggcctctgttgggagctggtgggaaaagcctcatacaggcctgtcaaaggctgctcagaggaggggctccctttgagcaggggctccctttcagcgccccctcatgtatgtgggcagcacacaagtccacatgtcagctgctcctcagctgccacataggagagggacaggtggaagcttgagggtctcaaggcagcacctgcacagactccagaaaagcatttcctccacttaccatattcaatacccaaaacatcaacaggcatgagcaaaccaagccacatgacagtcgccaacctcgcctggctcgcctcaagggctgaggaagcagagctcctgccccatctcagagctcccaaatccagctcctatgtcagcagcagccggccatccagaatccacttccattttaatgacttggctcctctgggcctgcaaacaagaggctggtccagggacctggcctggggataggagtggcggctctgacagggcagtggggcagtctccaatgagcacagatctgcactctcctgactaaaaggggtccccgtgcaagatgtcagctggaacgggggcagaagggatgccaggctctgtcactaacagtgccaagacgccaagctttgctgttgaccaagagaggctcagacaaaacacagctcagtgacacccttggggcatgcatccatggaacggcagatcccaacaccggccagccagctcctgggcagacaccgccccagggctagcaaggaacaggagtgggaggcccatgtctctggacacagcggaggctgctcacagccagggagggctggccttctcagctgatagggaggctgctgtccctaatgtgggtggagaacaacagttgtctgtgcccaagaaggaggggctgcaggcgagcatgcccctaggacagtgggggcctgtccttagtcctgctgtggccacctgcacactagcgcctctctacatcccagtcaccttgtgaatgcataaacaggaacatgtacaacggaaatgtcagcgggtgctcaggaaggctatgccagtggctacaggagagggagcgtggccaggggccctgcccacctccccgaacactgtcgcatgcagcacaggccttgcaattcacatactttacacgggcatagaaagagttacgttaaaattaatctctttactgatataattaaattttaaatcctgagaagaaaagagagaagggagaatggtgctgggtgtctagcacccccagccactggcccagcacatgccatggcatctgtgcatacagacacagggcgtggcatgcacaccccaccaggaagacacaggccagtgttcccaaagcctgctcacggcaccttctactgcaggacagcagaggggcccacagccagcctgcaggagggaggacttccggcccagatgcaagagcagctgcagcctggcaacacccaacaggtgagcatcaggagaaaggacctggtcacccacatggcgtgcagcacagctgctcctgctctccggaaggcctcaggctcagccccaccgggactgcagatactccttgcctggccactgtaccacaaagagcacttctgccatatggcagagacacgcacgttgcctggccgcccgcggcatgtgcggaagcccacagggaccaagctggctcggtggaggcagggcacagggcgcagatttctggaggctccagccccagctgccgcctcacagtctctcccaccatggcgctcagcaggtggtgaccttgtggacatttcgtaaacaagtcagcagccggtgatatgggcttcctggagctgcaaccacctcaaacacagactggaaggccctgcggtcgagctcctcctctatctggtgtctgtaaaagtctgtggcaaccaggcagaaaaggttgacgtccacctgctccagctttcccatcctgctgatgacatgtgggaggatcgccgcaacccatgggctggtggacgcgctgacgaagaagcaggagaggctccatgtggccatggcgactggggtcctctgcgtgaagttggagagggacagcatgacccagtcccggaccatggatgactgcccggtgctgtgcagagtctgaaacaccttatacaccaccgtggccatgaactgggggtatggctgctggttggacagaaactctccgatgactttgttcatgatgtcctggggtgggaagaagtcatctagaaactggggcaggatcctcgccaccactctggcttcacaaggaaagcctttcctgatcctatcaaaaagaacagacacccgctccatagcaacaatcaccgactcgctgtctggggctgcaggattagggtctgaagttctacccggactgactttctcctttcctgtgtacatgcaggtgagcatcaagcccagagccgccatggcccggtgcgggctgtgcacgttcactctgtccacactcagcttgaccagggattctgcatccaggcgggagagctgctcagagagcaggaggcgctccaggcctctgagggcacagtggtaaatgatagagggggtggactcctcacttccggacagcatcaccccacacatctgtattattgatgctgaaaattctggccctacgtccagaggatagttctcaatcaggtaaaacgcagtggcacacatgaccagtacgtgctgctggctgtgaatgttcacgcagtgggcgatccctttcaggttggagaggagatagtcactgatgactgggatgagctgcttggcagtatcgtccagcaggtcgcactccagcacatagaggatgccgtgcagggctccgaccctgctgggcaggtggctgctcctgagtgtgctctccagcaggcggctgacaggctccgccacgaccttgtccatcccaaggacggcagctgccttgcaggtggcgggcaccaggtactgagcgaggatctcgtcttctgaaggatgcacccttcgcagttctgtcagcgtcacatacatcagctcaaactggttgcgctcagtgaacaagtctgagaccaccagaagggatcgaaccacctcactgatcaggatggccggggtcctcctggctgagttggatggcaggatccagcggctgtacaactcgagtaaaaactgcgaacaggaatggatgtcaactccagcccggtgtttcctggagttgactggagacgtgggtggtgatgaaggtgcaggggcgtcggcctcctcctcctcctcctcgtcccattcctcctcccttaggggtgtgatgctgttccccagccacacagagtgtatggacacctggccgagtttgtagctcacgctccccagctcccgctcggggttgatctgcagcagcagcttctcgtggctgatgagggcacctgtggtagccggggacagagaagggacaggatcccacgcctggtataaatgatgggtggcgatgttctctctctttgaaaccattgcttgaatctcttgctctacaatccctctgataatgctcagcttcctcccaaacctggtgtccagagctttcagaggcttgttccgaggctgctgctccaagcagctcacagctgggttgccggccacaggcacggtcattgcactgagcaccagtgaggtgatggcctgcacggccaggacgttgatctgcgtcctctctgtgtcttcttctggtgggctctcctcctgctccatcacgaggggctgcgtcaccaggacaccaaggagagtggcccaagtttcttcaaactgagtacgactggtccagcctagcgtgttgatgcggtagatgaactccttaaagacttccttttcctggaggaactccacggggatctcagggaatgctgtgccaaaatcccctcccggtttgggtgaccatccaagcttccacaccagtgggggcacacgtgtgtagctgttgacaaggggcaggcgggccaggctgacgacgatgttcctgagcactgacgtgagaaacgccggcacgccactattccttttatgacccaaagccaacaccgactgcagagactccaccatttctgccaccatctcacaggctgcggtgatatacttcggattctgtgtgttaggatctatttcctcctcctcctctctgatggcttttggggtatttgtccttctttctggactaagaagctgctctccaggctgcactgcaacggcctccaggatgaagtgcacacagtggatgagggagcaggcgtgggtcacaaactctgcggaggagaccacgctccagaggccaggcagctgcagggccaggcagcagcagtccagccctgcctggagatccagactcagcggaatctgctcatggatcaaatgccaggacagggcctcaagggttgccaccacgaatttcatggtgtccttctctttctcaggaggaaggtgcaagtgactgggcagtttggagaccgccaccaggtactgtgccagggcccgggccagagtggtcagggactgatacagcgcagcatccccaaatagatcattcaacttgctccagtaggccgccggctctgcaggcaggtcggactggaagacgtggtggacagcagggagctgctgcacggtgctgctcacgcgggccagagtcacctcacgggctgcttcaaaaagcggactcctctggccaccagaaatttcactcatccctaggcttaagcatggagctagcaggcttaggttgaactccgagttcatcatgaaggcactcatatcttcagcaggaatccgattcaccagctctgcaccttccagcagcgcagaatctgacctggtccaacactgggatttgacaagatgaatgtaccagtctttgtccggactcactgtttccagtgacacgtgcccgtccccgtccagcgggtgggaagagactgggggagagggactaagtgagtcttgcatggtggagagacgaaacctgtccagcagggaatagagcctctggtgtctctgagcgagcccgctgctctgaaggtattcctggattctgttgagttcttccattggcaactgggccatgctgctctgtaaatttgcagccagaagcatttctacccggcgacaagcaaggatgtcgaccatgcgagccagcacacggaaaggggtgcacagcagcctgtccacatacaacgtgagcacagctcccgactggctgagatggatcccctccaagcactgaagagttttcttcagagtggttggagttgaaaggttttcacaacgagactgaattgcctggatgaagaggccgctggcagcggagttccgatgaacagcactgatgaagtcctgtactggaggctcgtgggaaaggctgatcagatcttgaatgtgatttacaatgagccacgttaagtgctcggagtcatggaggttctgacagacataatcacagaagagaatgagagcccctcttcgtactatttctctattgcacattccaagtttggctgccaagtcagaatcctcctcttctccagacatctggggactaagtaactttgtgctggacagactgtgtcttttcggggtctgctgcacttctgcccaccagcggtagtcggtgtggttgacaagcagcaggatctgacaccagagcagcaccagggccgggtgggtggtgatcatggaacgagcccgcaaattcaagctgtccagggtgtagaaactgccgccacagccatcactgcggaacagtctagtggcagctgctgtgattctccggaacattccagacttgaagatgtggatcagacacattagcagagtgcctagttcttggcaatagaaagtatgttgctgctcactcatttccaccttcagctgttttgtaacaatgtcttctaaaagaatacccaccagttgtaatagaaaccttgaaaatgtttcttccggcaaattctttatttgtttcccttcactgtgttcttctagtgctgaattactgtccccatctcttagcctattaattactggacaggagattaaatatggagagaaagagagctcctgaatacgagaaagaacaatatcttcagttgactgggaaatcagaaccctcaaaatggccagaattcctgatatccacagttgaacagtgctcacagatgccattgtgtttggagtgacgaacatactccgtaaaagcatgtccaccggacggagggaggaaggggccaaaatctcaaataatgtatttaacactccaagggcttcatgagagtcaatgtgcatctgctgtttggctaacattgggaggatgatgtcagctatctgtcgagacagtcgcttccacttgtcttcattctccttgtggcactgctgcaggacgagaatgaacatctccaacacctgatggtactggatgagtctcagtaacattgataccaccacttctttttgggtttcaagctcttttcctgcatcagctttatttgttcctcttaatacaaaaaggtcatggactatgggctgcagagccggtatggcgtgtgtcacagccttccttccactggccatgatgccatcacagagctgaatgattttaggaattccaatgatctgttttgaatgatagcgttcataagacagtaataccaagaagaaaaagatgtttggaatgattgcctctgattccctgaactggcccacttcaatgtattcgaactgtttcaatacaaagccaataaacacctgatctgaatccagaagacagtaattaacccgtaactgaaccagctgcgccagcaaatctaaaacctgcttctgtaactgcacagatgttgttgtcgtgtactgttttaaagcttttataacaagaggttcaaacaaacgaatgtgattatgaatagcattcttatctgcacggttctttgtgacacttgtgaggttcgtcttcaactgggtagacactttctggaggacatcaaaccatcccgaggtgtcgtgctcctgctccgcctgcaccatgttcctcaagctggcgtcagcgagggcctgggtgaagtgggtgtacggggccatgaagcagtagtggtacaagcctggcctcacactggaggagccaaggcgctgtgctcggccttgtgacttgctggggttggatgataagccgtcaaactgggaggccaagtttgtcccaaagagagtcttcaacaattgttgaacacaaacagttgccatcattggttctcgactaaagcaggatttcaggtatcctaggatctcctcaacacacttcccaatgtcctgcagtgtggccagctctagaatctgagagagaacgtccaaggctgagcgaagaaaccctccaaatttttccgtgctgttctgaagatccaaggtgaccttgtagttagcgtgcgtagctttcaggacatcatgcagtttgaggtatgaaggaagatgatagaaactccccagtgatgaggatttacttgttgtaacaggacctgaggtatcagattgtctagaagctgcactggcctcactgcctttcttgggactcaacggtacagatgcttgttctcctggttctttctccttcccctttcgtcggatgggacttagagaaggggggtttgttagagaaggcaaggctgcctttattgccggtccaggagccacgtcgtccaggacatgtgcacaaatgttgatcaccttcagcaggtgggagaagagctgctccaccatgggcaccaaggcccggtcccctagggctggccagacctcctcttgcttggtggctgctgggttggcttcttcttcagaggcccatgaacttctcagagatttaggagcactggctgcaagcaagtttccggccaaaatcaaagcatcttgatgggctgagagatccaatgggaaccaagctgacgagagcagggtcagaatcatcgtggccatcccaacggtacagctcttcctagactcatcggaggcgctcagtggaggcactccacagtgccaacctaaactccaaatgcaaactgggaaggcagtggaaagaagacacaaagcttcacagcatccaaaagtgagtgctctcgtggttgatgtgatcagttcatgagaaactgctgcaataactcttgaaaggttattttccatagtgacatctgttatgcttggtagtaggttatagcctctgtatattctggttattgtgctgacggagaaatgagatggaggctgcgtctcatgcatgagaagtttcaggtaaacactgctttgatctcttgccacggccactactgggtcagcttgtccttggtcacatttataaaacagctttgggacaagcctaattaatgatgctgcagcaacatgtcgcaccctggggtcttcatccccaagcaaatggatgacaacattattgagcactcgttcttgcagctttaaaagccctgtataatgatgagcccctctgtgtaagttttctgcttttgcctccaaaaagctcaccagcctgaagtcaatctccgcaagggtttccagaagctctgtcctcaccagccaataggaactgttcctcagagtcagcacgtcgatgatcagctgcagtcctaactcactgtagctgctgctgcagagactcatgacacaatgcctcacagctgtacaagccagcttgcaagtgacagaagactcgtccttcagtgttttccgcagcaaaggaatgcaatccgccaaagaaaatgtgtttcctgtcagggttctaatggcgcccatccaatctcccacgtggaagcgggacctgctgaggatggagcagatgagggtcccacagagaatggcagtggctcctcgaacctgtgggtctccatgatcgatgtagttcaagatatctgagacatattgttcctcagggtattctgtggtgtcaagaggaactttatagagtttgctgaagaaagattctgggtggagagccacagctgctcccacacagctgagggccagggccttcacgctgaccctcacatcccggtccggaaccagcacattttttccccctgttagcaaaaacgaagcagataaaaggcggacacaatggacaagaggtgcagaatcatcatcagtggactgtccgatgtcacctttgatgcggcaaggcttgttttcttgatcacccggttcagtagcttcatctctcaacacaaatttatcaacactgctgtcagaaggctgcctgctgtgactcatgtttttcaataaatgtgcttgttgaagggccatggaagagttcctgaaggcctccgaggcttcgtcaggaagaacacctgtggcttcctcatcttcatcctggggctgtccaatctgcaggcccaaatactggttgtcggtaccgtctaacacaatttcagaactgtctgaaggggtgacagctgaatcaggcccttcggtggtggtctgggagctgtcgctgatgggcgaggaggcctgggtcccatcattcaggtccatggcagggtcagatgggacggcgctgacctggctggagctgtggctcaagatatcctcctcatccccatccgtggcagagcttgtcaagtcacagctggccagatccactgagtccgcctgcagcgtgtgctgtgaccgtggctgctccgtgatgatgtcgtgacctgctgaccctggagtggaaacccctgaagaagtagccagctctccactgatatcatccttcactgaggctgcaaaggcagagctgctgacatccgatctcgattcagagtcatcctccaaggcttcttcttctcctaagagcactttgcctttttgttttcttgaaaggacagggctgcatgaggaaccccctccagctataagttccacaatactcccactacggcttcggccaccagactcctccttagcggcggtgagctgcccaatgccccccactgtggtcagggcttgcagaagctcggggggaggcgttctgaagagctgctgcaacagctccagggctccggtcacaacattgtggtcttggtgctgtgtatgatgtaacgtcagttcataaacctggacaagctgctccgcagaaggacagacctccatttctttccgtgtcactccgaagctgcctttcaggcttgtatccttgacctgctgctgcagcaagggcaccaaatacctcagggtgagcagcacgccaagaatcagcagggtggagtgctcctcctcgacaggaaccagtaagcctaagagcacatttagtagccagctatagaaatactgtgtccttcttgagtgctggcagatgctcactgctgatccagcagctgtccgccgaatggtgggggagcttgacttcaggttcgctatgaaggcctttaacaaaaccttaatttcattgtcatttgcaaaattgccgaaagaagccataattttgggaacagctgcagccaaggtctcctggactgattcctcgggtctcttgcttgttcgacttaggcacggcagaaggttcaccaggtaaggcctgcatttctgaggccgaaccaggtgagccagctcggcaaacctccacagggcagcacgcaaactccgaggggcaccattctttttaatttctttatagagctcgagctgtaaccttggaagattagaatccatcaaagctttgataactttgttgaggcattcatcagccaccattctgacatccgactctgcgtcatcactgcacagcagaaaaagttccatagcgatgcccagaagtttctgaaattctggagaatttctgacagactgtgccactatgttttcacatattgtcagacaatgattcacacggtctttcttggtagctgaaagttctttctttggtcggtgcagcggctcctcagccacagccgggccgggtggctgctgctgctgctgctgctggaaggacttgagagactcgaaggccttcatcagcttttccagggtcgccatggcggtctcccgcccggctgggcagtccccggaggcctcgggccgactcgcagcgccgctcagcaccggggcaatgaatggggctctgggccgcgggtaaaagcggaaccgaagcggccgtccatcttggacccgtcccggcagcccccgcggcgcct

SEQ ID NO: 10 - DNA, 13447 bp, Macaca mulatta
  source 1..13447: mol_type = genomic DNA
tggtttcaatgtttttcctttaatttggatgtacaatgtttgcagcagttaaaaaaattaaatatacatctctcgtcagtccttccctttgctctcagaagcagtcaggtctgggtggggctccgggactcgcccatcacagccctgctggctccaggggagctcaggctcagctgacagtccctctgaccacagcgcaaagcaatgagacctggacaaggaggccccacgtgggtcagagcccaccctccgtaggcaggtccacgttggccacaatcctccaaggctggcaatcaccacccagattgcagcgggagactctgcttttggaaacaactgagggaaggcgttccttggactgcaccagagcgtgacaggcacacgggggaagagtggcctctgaaccttccaggttgccttcagttgtcatgcagcgctctgagcggctccctccttcccaggaggcccaggcctggcgagcgagtgtcctcttctcgcctggaccatcctgagctctccagggtgcctcggcagctctcaagatcttccttcttctcgctccctcaggtggcccctccggagcacagctccaagcctaccctggccagcagctgtggtcctgggtcctccccgcagagggaggaagtggggagggacaaagccgggtgaggatgtctgctgggcaggatgctcacaggtagcaggagcaggctgactccaccccacagacacacagaactaacctcactccgcccctcagggggaggaacttccacctgccaggcagccacagaccgagttattgctgtttactatccgtcccgagctccgtggggggctcagctcagctccaagaggacgagctgttcatcggctccgagggctctggaatgacccctccatgaaggtgggggcgggggtgtcctttagggcacagggccttctcagatgctacattctgggtgtctggaggggtttccgcttcacattttcctcctgaaaggacacgtgtgctggcagaaatgggggtggacagtaacaaagagcgcttggcagccggaaacgtcacctacacagactcagctgggcccgcagcggaagggaggcacgttttgggacagaaacgcgcttcagtgcattgccaaacaattctaccctggtttcattaaagtctttcctgatattaccagcagcaaaacaaaagcagtctccccgcagctcacccccaaaacttgacaaccaaattaatcacattttcaacacaatttggataatatgattggtgcttgccataggttttttaggaacgcgacaaagtcttcctcccttcggcagagttgatatggagaccgttttctccggtgggatcctagtgagccatgaatgagccctgctctgaccaagccccgcgcctggacgcccgtcacacagctaactttacctggcaggtctgaggaaagtcaacttccaggaagaaccgacacgggcactcttggaggccatgcatctctgtcttgagatgtgcgtgtataaaactacagatgtgtccatatgcacgtgcacgtgtacttgacttacgcatgggtaaagtcattttactaatgagctcatattcatctctggagcacacaggcaggcctttgggagtgggggacacccactgccagagcggggtgttctgagccccttgctaaggactgttttagatcacgtcgtaaacaaaaggaagacaaactctgtgttgagcccagcgatatgcattccaaggggaatggctccgttttacattcacagtgttatttcttacaaatgtaaacatctagcagaacaacatctggcctgtgatacttctgtctccgagctgttgacataacttactgcaggggaggtgggtggggagcagcaacggttctgagaactttcccctcattcccaaagcttctagcaggctttccaggaagaagctaggatgagaaacaggagcccccaaccaatacggaagaatggtggctttcttgttaaaattcagtagcttcccttaagggcctcctcaaacatcagacccctttctaccgctcctgctgccctgccacgaggacgaggtggtcctggctgggggaggcctctgttgggagctggtgggaaaagcctcatacaggcctgtcaaaggctgctcagaggaggggctccctttgagcaggggctccctttcagcgccccctcatgtatgtgggcagcacacaagtccacatgtcagctgctcctcagctgccacataggagagggacaggtggaagcttgagggtctcaaggcagcacctgcacagactccagaaaagcatttcctccacttaccatattcaatacccaaaacatcaacaggcatgagcaaaccaagccacatgacagtcgccaacctcgcctggctcgcctcaagggctgaggaagcagagctcctgccccatctcagagctcccaaatccagctcctatgtcagcagcagccggccatccagaatccacttccattttaatgacttggctcctctgggcctgcaaacaagaggctggtccagggacctggcctggggataggagtggcggctctgacagggcagtggggcagtctccaatgagcacagatctgcactctcctgactaaaaggggtccccgtgcaagatgtcagctggaacgggggcagaagggatgccaggctctgtcactaacagtgccaagacgccaagctttgctgttgaccaagagaggctcagacaaaacacagctcagtgacacccttggggcatgcatccatggaacggcagatcccatcaccggccagccagctcctgggcagacaccgccccagggctagcaaggaacaggagtgggaggcccatgtctctggacacagcggaggctgctcacagccagggagggctggccttctcagctgatagggaggctgctgtccctaatgtgggtggagaacaacagttgtctgtgcccaagaaggaggggctgcaggcgagcatgcccctaggacagtgggggcctgtccttagtcctgctgtggccacctgcacactagcgcctctctacatcccagtcaccttgtgaatgcataaacaggaacatgtacaacggaaatgtcagcgggtgctcaggaaggctatgccagtggctacaggagagggagcgtggccaggggccctgcccacctccccgaacactgtcgcatgcagcacaggccttgcaattcacatactttacacgggcatagaaagagttacgttaaaattaatctctttactgatataattaaattttaaatcctgagaagaaaagagagaagggagaatggtgctgggtgtctagcacccccagccactggcccagcacatgccatggcatctgtgcatacagacacagggcgtggcatgcacaccccaccaggaagacacaggccagtgttcccaaagcctgctcacggcaccttctactgcaggacagcagaggggcccacagccagcctgcaggagggaggacttccggcccagatgcaagagcagctgcagcctggcaacacccaacaggtgagcatcaggagaaaggacctggtcacccacatggcgtgcagcacagctgctcctgctctccggaaggcctcaggctcagccccaccgggactgcagatactccttgcctggccactgtaccacaaagagcacttctgccatatggcagagacacgcacgttgcctggccgcccgcggcatgtgcggaagcccacagggaccaagctggctcggtggaggcagggcacagggcgcagatttctggaggctccagccccagctgccgcctcacagtctctcccaccatggcgctcagcaggtggtgaccttgtggacatttcgtaaacaagtcagcagccggtgatatgggcttcctggagctgcaaccacctcaaacacagactggaaggccctgcggtcgagctcctcctctatctggtgtctgtaaaagtctgtggcaaccaggcagaaaaggttgacgtccacctgctccagctttcccatcctgctgatgacatgtgggaggatcgccgcaacccatgggctggtggacgcgctgacgaagaagcaggagaggctccatgtggccatggcgactggggtcctctgtgtgaagttggagagggacagcatgacccagtcccggaccatggatgactgcccggtgctgtgcagagtctgaaacaccttatacaccacggtggccatgaactgggggtatggctgctggttggacagaaactctccgatgactttgttcatgatgtcctggggtgggaagaagtcgtctagaaactggggcaggatcctcgccaccactctggcttcacaaggaaagcctttcctgatcctatcaaaaagaacagacacccgctccatagcaacaatcaccgactcgctgtctggggctgcaggattagggtctgaagttctacccggactgactttctcctttcctgtgtacatgcaggtgagcatcaagcccagagccgccatggcccggtgcgggctgtgcacgttcactctgtccacactcagcttgaccagggattctgcatccaggcgggagagctgctcagagagcaggaggcgctccaggcctctgagggcacagtggtaaatgatagagggggtggactcctcacttccggacagcatcaccccacacatctgtattattgatgctgaaaattctggccctacgtccagaggatagttctcaatcaggtaaaacgcagtggcacacatgaccagtacgtgctgctggctgtgaatgttcacgcagtgggcgatccctttcaggttggagaggagatagtcactgatgactgggatgagctgcttggcagtatcgtccagcaggtcgcactccagcacatagaggatgccgtgcagggctccgaccctgctgggcaggtggctgctcctgagtgtgctctccagcaggcggctgacaggctccgccacgaccttgtccatcccaaggacggcagctgccttgcaggtggcgggcaccaggtactgagcgaggatctcgtcttctgaaggatgcacccttcgcagttctgtcagcgtcacatacatcagctcaaactggttgcgctcagtgaacaagtctgagaccaccagaagggatcgaaccacctcactgatcaggatggccggggtcctcctggctgagttggatggcaggatccagcggctgtacaactcgagtaaaaactgcgaacaggaatggatgtcaactccagcccggtgtttcctggagttgactggagacgtgggtggtgatgaaggtgcaggggcgtcggcctcctcctcctcctcctcgtcccattcctcctcccttaggggtgtgatgctgttccccagccacacagagtgtatggacacctggccgagtttgtagctcacgctccccagctcccgctcggggttgatctgcagcagcagcttctcgtggctgatgagggcacctgtggtagccggggacagagaagggacaggatcccacgcctggtataaatgatgggtggcgatgttctctctctttgaaaccattgcttgaatctcttgctctacaatccctctgataatgctcagcttcctcccaaacctggtgtccagagctttcagaggcttgttccgaggctgctgctccaagcagctcacagctgggttgccggccacaggcacggtcattgcactgagcaccagtgaggtgatggcctgcacggccaggacgttgatctgcgtcctctctgtgtcttcttctggtgggctctcctcctgctccatcacgaggggctgcgtcaccaggacaccaaggagagtggcccaagtttcttcaaactgagtacgactggtccagcctagcgtgttgatgcggtagatgaactccttaaagacttccttttcctggaggaactccacggggatctcagggaatgctgtgccaaaatcccctcccggtttgggtgaccatccaagcttccacaccagtgggggcacacgtgtgtagctgttgacaaggggcaggcgggccaggctgacgacgatgttcctgagcactgacgtgagaaacgccggcacgccactattccttttatgacccaaagccaacaccgactgcagagactccaccatttctgccaccatctcacaggctgcggtgatatacttcggattctgtgtgttaggatctatttcctcctcctcctctctgatgacttttggggtatttgtccttctttctggactaagaagctgctctccaggctgcactgcaacggcctccaggatgaagtgcacacagtggatgagggagcaggcgtgggtcacaaactctgcggaggagaccacgctccagaggccaggcagctgcagggccaggcagcagcagtccagccctgcctggagatccagactcagcggaatctgctcatggatcaaatgccaggacagggcctcaagggttgccaccacgaatttcatggtgtccttctctttctcaggaggaaggtgcaagtgactgggcagtttggagaccgccaccaggtactgtgccagggcccgggccagagtggtcagggactgatacagcgcagcatccccaaatagatcattcaacttgctccagtaggccgccggctctgcaggcaggtcggactggaagacgtggtggacagcagggagctgctgcacggtgctgctcacgcgggccagagtcacctcacaggctgcttcaaaaagcggactcttctggccaccagaaatttcactcatccctaggcttaagcatggagctagcaggcttaggttgaactccgagttcatcatgaaggcactcatatcttcagcaggaatccgattcaccagctctgcaccttccagcagtgcagaatctgacctggtccaacactgggatttgacaagatgaatgtaccagtctttgtccggactcactgtttccagtgacacgtgcccatccccgtccagcgggtgggaagagactgggggagagggactaagtgagtcttgcatggtggagagacgaaacctgtccagcagggaatagagcctctggtgtctctgagcgagcccgctgctctgaaggtattcctggattctgttgagttcttccattggcaactgggccatgctgctctgtaaatttgcagccagaagcatttctacccggcgacaagcaaggatgtcgaccatgcgagccagcacacggaaaggggtgcacagcagcctgtccacatacaacgtgagcacagctcccgactggctgagatggatcccctccaagcactgaagagttttcttcagagtggttggagttgaaaggttttcacaacgagactgaattgcctggatgaagaggccgctggcagcggagttccgatgaacagcactgatgaagtcctgtactggaggctcgtgggaaaggctgatcagatcttgaatgtgatttacaatgagccacgttaagtgctcggagtcatggaggttctgacagacataatcacagaagagaatgagagcccctcttcgtactatttctctattgcacactccaagtttggctgccaagtcagaatcctcctcttctccagacatctggggactaagtaactttgtgctggacagactgtgtcttttcggggtctgctgcacttctgcccaccagcggtagtcggtgtggttgacaagcagcaggatctgacaccagagcagcaccagggccgggtgggtggtgatcatggaacgagcccgcaaattcaagctgtccagggtgtagaaactgccgccacagccatcactgcggaacagtctagtggcagctgctgtgattctccggaacattccagacttgaagatgtggatcagacacattagcagagtgcctagttcttggcaatagaaagtatgttgctgctcactcatttccaccttcagctgttttgtaacaatgtcttctaaaagaatacccaccagttgtaatagaaaccttgaaaatgtttcttctggcaaattctttatttgtttcccttcactgtgttcttctagtgctgaattactgtccccatctcttagcctattaattactggacaggagattaaatatggagagaaagagagctcctgaatacgagaaagaacaatatcttcagttgactgggaaatcagaaccctcaaaatggccagaattcctgatatccacagttgaacagtgctcacagatgccattgtgtttggagtgacgaacatactccgtaaaagcatgtccaccggacggagggaggaaggggccaaaatctcaaataatgtatttaacactccaagggcttcatgagagtcaatgtgcatctgctgtttggctaacattgggaggatgatgtcagctatctgtcgagacagtcgcttccacttgtcttcattctccttgtggcactgctgcaggacgagaatgaacatctccaacacctgatggtactggatgagtctcagtaacattgataccaccacttctttttgggtttcaagctcttttcctgcatcagctttatttgttcctcttaatacaaaaaggtcatggactatgggctgcagagccggtatggcgtgtgtcacagccttccttccactggccatgatgccatcacagagctgaatgattttaggaattccaatgatctgttttgaatgatagcgttcataagacagtaataccaagaagaaaaagatgtttggaatgattgcctctgattccctgaactggcccacttcaatgtattcgaactgtttcaatacaaagccaataaacacctgatctgaatccagaagacagtaattaacccgtaactgaaccagctgcgccagcaaatctaaaacctgcttctgtaactgcacagatgttgttgtcgtgtactgttttaaagcttttataacaagaggttcaaacaaacgaatgtgattatgaatagcattcttatctgcacggttctttgtgacacttgtgaggttcgtcttcaactgggtagacactttctggaggacatcaaaccatcccgaggtgtcgtgctcctgctccgcctgcaccatgttcctcaggctggcgtcagcgagggcctgggtgaagtgggtgtacggggccatgaagcagtagtggtacaagcctggcctcacactggaggagccaaggcgctgtgctcggccttgtgacttgctggggttggatgataagccgtcaaactgggaggccaagtttgtcccaaagagagtcttcaacaattgttgaacacaaacagttgccatcattggttctcgactaaagcaggatttcaggtatcctaggatctcctcaacacacttcccaatgtcctgcagtgtggccagctctagaatctgagagagaacgtccaaggctgagcgaagaaaccctccaaatttttccgtgctgttctgaagatccaaggtgaccttgtagttagcgtgcgtagctttcaggacatcatgcagtttgaggtatgaaggaagatgatagaaactccccagtgatgaggatttacttgttgtaacaggacctgaggtatcagattgtctagaagctgcactggcctcactgcctttcttgggactcaacggtacagatgcttgttctcctggttctttctccttcccctttcgtcggatgggacttagagaaggggggtttgttagagaaggcaaggctgcctttattgccggtccaggagccacgtcgtccaggacatgtgcacaaatgttgatcaccttcagcaggtgggagaagagctgctccaccatgggcaccaaggcccggtcccccagggctggccagacctcctcttgcttggtggctgctgggttggcttcttcttcagaggcccatgaacttctcagagatttaggagcactggctgcaagcaagtttccggccaaaatcaaagcatcttgatgggctgagagatccaatgggaaccaagctgacgagagcagggtcagaatcatcgtggccatcccaacggtacagctcttcctagactcatcggaggcgctcagtggaggcactccacagtgccaacctaaactccaaatgcaaactgggaaggcagtggaaagaagacacaaagcttcacagcatccaaaagtgagtgctctcgtggttgatgtgatcagttcatgagaaactgctgcaataactcttgaaaggttattttccatagtgacatctgttatgcttggcagtaggttatagcctctgtatattctggttattgtgctgacggagaaatgagatggaggctgcgtctcatgcatgagaagtttcaggtaaacactgctttgatctcttgccacggccactactgggtcagcttgtccttggtcacatttataaaacagctttgggacaagcctaattaatgatgctgcagcaacatgtcgcaccctggggtcttcatccccaagcaaatggatgacaacattattgagcactcgttcttgcagctttaaaagccctgtataatgatgagcccctctgtgtaagttttctgcttttgcctccaaaaagctcaccagcctgaagtcaatctccgcaagggtttccagaagctctgtcctcaccagccaataggaactgttcctcagagtcagcacgtcgatgatcagctgcagtcctaactcactgtagctgctgctgcagagactcatgacacaatgcctcacagctgtacaggccagcttgcaagtgacagaagactcgtccttcagtgttttccgcagcaaaggaatgcaatccgccaaagaaaatgtgtttcctgtcagggttctaatggcgcccatccaatctcccacgtggaagcgggacctgctgaggatggagcagatgagggtcccacagagaatggcagtggctcctcgaacctgtgggtctccatgatcgatgtagttcaagatatctgagacatattgttcctcagggtattctgtggtgtcaagaggaactttatagagtttgctgaagaaagattctgggtggagagccacagctgctcccacacagctgagggccagggccttcacgctgaccctcacatcccggtccggaaccagcacattttttccccctgttagcaaaaatgaagcagataaaaggcggacacaatggacaagaggtgcagaatcatcatcagtggactgtccaatgtcacctttgatgcggcaaggcttgttttcttgatcacccggttcagtagcttcatctctcaacacaaatttatcaacactgctgtcagaaggctgcctgctgtgactcatgtttttcaataaatgtgcttgttgaagggccatggaagagttcctgaaggcctccgaggcttcgtcaggaagaacacctgtggcttcctcatcttcatcctggggctgtccaatctgcaggcccaaatactggttgtcggtaccgtctaacacaatttcagaactgtctgaaggggtgacagctgaatcaggcccttcggtggtggtctgggagctgtcgctgatgggcgaggaggcctgggtcccatcattcaggtccatggcagggtcagatgggacggcgctgacctggctggagctgtggctcaagatatcctcctcatccccatccgtggcagagcttgtcaagtcacagctggccagatccactgagtccgcctgcagcgtgtgctgtgaccgtggctgctccgtgatgatgtcgtgacctgctgaccctggagtggaaacccctgaagaagtagccagctctccactgatatcatccttcactgaggctgcaaaggcagagctgctgacatccgatctcgattcagagtcatcctccaaggcttcttcttctcctaagagcactttgcctttttgttttcttgaaaggacagggctgcatgaggaaccccctccagctataagttccacaatactcccactacggcttcggccaccagactcctccttagcggcggtaagctgcccaatgccccccactgtggtcagggcttgcagaagctcggggggaggcgttctgaagagctgctgcaacagctccagggctccggtcacaacattgtggtcttggtgctgtgtatgatgtaacgtcagttcataaacctggacaagctgctctgcagaaggagagacctccatttctttccgtgtcactccgaagctgcctttcaggcttgtatccttgacctgctgctgcagcaagggcaccaaatacctcagggtgagcagcacgccaagaatcagcagggtggagtgctcctcctcgacaggaaccagtaagcctaagagcacatttagtagccagctatagaaatactgtgtccttcttgagtgctggcagatgctcactgctgatccagcagctgtccgccgaatagtgggggagcttgacttcaggttcgctatgaaggcctttaacaaaaccttaatttcattgtcatttgcaaaattgccgaaagaagccataattttgggaacagctgcagccaaggtctcctggactgattcctcgggtctcttgcttgttcgacttaggcacggcagaaggttcaccaggtaaggcctgcatttctgaggccgaaccaggtgagccagctcggcaaacctccacagggcagcacgcaaactccgaggggcaccattctttttaatttctttatagagctcgagctgtaaccttggaagattagaatccatcaaagctttgataactttgttgaggcattcatcagccaccattctgacatccgactctgcgtcatcactgcacagcagaaaaagttccatagcgatgcccagaagtttctgaaattctggagaatttctgacagactgtgccactatgttttcacatattgtcagacaatgattcacacggtctttcttggtagctgaaagttctttctttggtcggtgcagcggctcctcagccacagccgggccgggtggtggcgggggcggcggcgggggcggctgcggctgaggcagcatcggctgtgcctgcggcggctgaggaagctgaggaggaggaggcggcggcggcggcggcggcggcggctgttgctgctgctgctgctgctgctgctgctggaaggacttgagagactcgaaggccttcatcagcttttccagggtcgccatggcggtctcccgcccggctaggcagtccccggaggcctcgggccgactcgcagcgccgctcagcaccggggcaatgaatggggctctgggccgcgggtaaaagcggaaccgaagcggccgtccatcttggacccgtcccggcagcccccgcggcgccttgc

SEQ ID NO: 11 - DNA, 176286 bp, Homo sapiens
  source 1..176286: mol_type = genomic DNA
acagatgaaggaggacgcgcccccgccgctgtcctgcgcctcagccatcctatgagacgggaaaggtttctgtctgcagctgggcccgtgctctttaccagctcctggctttcttctctggaaggttcctgcctgttttgccctcacacctgctcctctctcagccctctcaggggtggggctggaggccaccaaagagcctcctctgctctccagttgctcgactgctcctcatttccccctggggtctgcgtcagggtttccttcttttccagccccaccccgcgtgcatcccacctggtctcgggtcggggctgctcccgcttactgccccctgcccaggctggtgtgcaccccctctggctgctttcaaggcctcttctctcttctcggcaggacaggcacaggcaggtggccaggtgtcatgcttagctccccgcccagtgagattctttcatttaacaatcttcccctgaatagttcatgttcattgctgaaaatttgaaaaatatggaaaagcacaaagattaagatataaaccgccctcaattcccctgcccagagagagtcactgctatgacttggtgactaggaaccttatttctctctcgctcttttttttttttttgagacagagtcttgctctgtcacccaggctggagtgcagtggctcgatctcagctcactgcaacctccgcctcctgggttcaagcgattctcctgcctcagcctcttgagtagctgggattacaggcacctgccaccatgcccggctaatttttgtatttttagttgagagagggtttcatcttgttggtcaggcggacttgaactcctgacctcaggtgatcagcccacctcggcctcccaaagtgctgggattacaggtgtgagccactgcgccttcatctctcttctgtgtatgtgtacgctgttttttctttagaatgggggacgttatcaggctctacatggtgtgtagtcggctagcatgttgtaagcctttccctgtgtcacaagtgctcatctggaacaggattctaatgactgcctgtggctatgttgggattcctttaactcagctccttctgcccagcatctatcttttttccatcttttgtcctaagtgttgctataataaatcattgatcacacatgcctgactgtttgcataggataaattacgggaaatgtttttgctgttcagggactgtgcccatttttaggcctcagagacaccatgccagactgcccagtattgatctttactctttttagatgatgccaaacttttctgtgaactttaaaaacctgtgtcttgacagtccatttctgtaagtctttcacattagatttcctgtcaggatgatagtcaattctaggcagatgatgttttctcagccatggctgaagcagttgtgatttgttgtggccatgtaaagtcccgatgatccattgcctccctggatgggttggaataatttggtttgggagcatataacagaatgacctggagtcacagcagctcagacggaagtgtatttctcccttacagatgaaagaattccaggccaggctggaatgacaactgcacacagtcatctgggccccctccttccagctcccatcaccccaggatgtggcttttatgcagatgatccaaaatggctgctcaagtcccagccaacacatcccattccagggagcaggaaaaaggtgtgtctttcccttcattttatgtgattcctttctagaagtactactcattacttctgcttgcatctccctggctagcacttacttagttatatggccatagctagctgaaggaaggacagggactgtcatacactagctaagaggcaaactgcttagataaaaaggtctctaaagaaggtcagagcggctgctagggtgcaactctattacttattgttatgggacgaactgtgtccctcattcaggttgatgtcctaagccccagaacctcagaatgggattgtatttggagacaggttctttaaggaggtaaggaggctaaaatgagatcattagggtgggccataatccgactgatgtcttacaagaagagattaggacacggacatgctcagagggacggccacgtgaggacaccaagaaaggcagctgtctgcaagtcaaggacagggctcaggggaaaccaaccttgccaacaccttcatctcggacttctagcctctaggaccatgagaagatacatttctgttgtttaagctgcccggtctgtggtactttgttatggcagcccaagtaaacaaatacagtcatctgctgctggaacaaatcaccccagcactgtggcttggcagcacacatgtctagtcatagagttatatgtagttacgtgtagagccatatgtatcgtcacacgttctgtgggtcaggaatttggacccagcttaaccagctccacttctcgccagggttcagtcaaataccagctgcctcccacctgagagctcagccggggaagggtccctttccaatctcacgtggtgttggcaggatccagttcctcatggcctgctggactgagaacctcagttctcactgcctgttggccagaggccgcctttatgtcctcgccatgtgggcctctccaacatggcagctgacttcatcagagcatccatgccaagaaggcaacagagagggccagggagactgaagtcatacccttttgcgacctagtcatggggtgacattccatcacctttgcccattggttagaagcaggccaccaggtacagcccaagctcacggggaggggtcatacaagggtgtcaataccaggaggtgaggggtgctggggccatcttatgagtctgcccactgaggtaactaacaaccttgaggcctgacacagtggacaaaggcccttattaacagcagagaactgggaactttatttatttatttatttttgagacagagtctcactcttgtcacccaggctggagtgcaatggcatgatcttggctcactgcaacctccacctcccaggttcaagcaattctgcctcagcctccggaatagctgggactacaggcatgcaccactacacccggctaatttttgtatttttagtagagacagggtttcgccatgttggccaggctggtctcgaactcctgacctctggtgatctgcctgccttggcctcccaaagtgctgggattacaggcgtgagccaccgcacctcgctggaacttaatttttttagagacagtgtcgctctatcacccaagctggagtgcagtggtgcaatcctagctcacttgcagcctcaaattcctgggttcaggtgatcctcccacatcagcctcccaagaactgggaactaacagctgtttctctgctgtccttctcaagaaaagggaggctactgctaccccactggggacaatgctgggtttccctttaggacaggctctgagacaaggcggaggtgctgtttgtggccacagagcaggggactctgggttgcaggtgtggcctggctaaagtaggctttactgggctcctctctgcctgcatcaccccccggctgggcggttgtctctgaggccaaccttactccctgctgggcaggctggacagctgccctctccgtttgcccctctaccacccaaaaggcaggaggctctggagaccaggaccctgcccgccacggcctgtgtcccaggcgtgagggggtgccccacagacctctgctgagctgctgctgaatgacgccccttgggggtcctgccggaaggtcagagcaggggtgcactcccataaagaaacgcccccaggtcgggactcattcctgtgggcggcatcttgtggccatagctgcttctcgctgcactaatcacagtgcctctgtgggcagcaggcgctgaccacccaggcctgccccagaccctctcctcccttccggggcgctgcgctgggaccgatggggggcgccaggcctgtggacaccgccctgcaggggcctctccagctcactgggggtggggtgggggtcacacttggggtcctcaggtcgtgccgaccacgcgcattctctgcgctctgcgcaggagctcgcccaccctctccccgtgcagagagccccgcagctggctccccgcagggctgtccgggtgagtatggctctggccacgggccagtgtggcgggagggcaaaccccaaggccacctcggctcagagtccacggccggctgtcgccccgctccaggcgtcggcgggggatcctttccgcatgggcctgcgcccgcgctcggcgccccctccacggccccgccccgtccatggccccgtccttcatgggcgagcccctccatggccctgcccctccgcgccccacccctccctcgccccacctctcaccttcctgccccgcccccagcctccccacccctcaccggccagtcccctcccctatcccgctccgcccctcagccgccccgcccctcagccggcctgcctaatgtccccgtccccagcatcgccccgccccgcccccgtctcgccccgcccctcaggcggcctccctgctgtgccccgccccggcctcgccacgcccctacctcaccacgccccccgcatcgccacgccccccgcatcgccacgcctcccttaccatgcagtcccgccccgtcccttcctcgtcccgcctcgccgcgacacttcacacacagcttcgcctcaccccattacagtctcaccacgccccgtcccctctccgttgagccccgcgccttcgcccgggtggggcgctgcgctgtcagcggccttgctgtgtgaggcagaacctgcgggggcaggggcgggctggttccctggccagccattggcagagtccgcaggctagggctgtcaatcatgctggccggcgtggccccgcctccgccggcgcggccccgcctccgccggcgcagcgtctgggacgcaaggcgccgtgggggctgccgggacgggtccaagatggacggccgctcaggttctgcttttacctgcggcccagagccccattcattgccccggtgctgagcggcgccgcgagtcggcccgaggcctccggggactgccgtgccgggcgggagaccgccatggcgaccctggaaaagctgatgaaggccttcgagtccctcaagtccttccagcagcagcagcagcagcagcagcagcagcagcagcagcagcagcagcagcagcagcagcagcaacagccgccaccgccgccgccgccgccgccgcctcctcagcttcctcagccgccgccgcaggcacagccgctgctgcctcagccgcagccgcccccgccgccgcccccgccgccacccggcccggctgtggctgaggagccgctgcaccgaccgtgagtttgggcccgctgcagctccctgtcccggcgggtcccaggctacggcggggatggcggtaaccctgcagcctgcgggccggcgacacgaacccccggccccgcagagacagagtgacccagcaacccagagcccatgagggacacccgccccctcctggggcgaggccttcccccacttcagccccgctccctcacttgggtcttcccttgtcctctcgcgaggggaggcagagccttgttggggcctgtcctgaattcaccgaggggagtcacggcctcagccctctcgcccttcgcaggatgcgaagagttggggcgagaacttgtttctttttatttgcgagaaaccagggcgggggttcttttaactgcgttgtgaagagaacttggaggagccgagatttgctcagtgccacttccctcttctagtctgagagggaagagggctgggggcgcgggacacttcgagaggaggcggggtttggagctggagagatgtgggggcagtggatgacataatgcttttaggacgcctcggcgggagtggcggggcagggggggggcggggagtgagggcgcgtccaatgggagatttcttttcctagtggcacttaaaacagcctgagatttgaggctcttcctacattgtcaggacatttcatttagttcatgatcacggtggtagtaacacgattttaagcaccacctaagagatctgctcatctaagcctaagttggtctgcaggcgtttgaatgagttgtggttgccaagtaaagtggtgaacttacgtggtgattaatgaaattatcttaaatattaggaagagttgattgaagttttttgcctatgtgtgttgggaataaaaccaacacgttgctgatggggaggttaattgccgagggatgaatgaggtgtacattttaccagtattccagtcaggcttgccagaatacggggggtccgcagactccgtgggcatctcagatgtgccagtgaaagggtttctgtttgcttcattgctgacagcttgttactttttggaagctaggggtttctgttgcttgttcttggggagaatttttgaaacaggaaaagagagaccattaaaacatctagcggaaccccaggactttccctggaagtctgtgtgtcgagtgtacagtaggagttaggaagtactctggtgcagttcaggcctttctcttacctctcagtattctatttccgatctggatgtgtcccagatggcatttggtaagaatatctctgttaagactgattaatttttagtaatatttcttgttctttgtttctgttatgatccttgtctcgtcttcaaagtttaattagaaaatgattcggagagcagtgttagcttatttgttggaataaaatttaggaataaattattctaaaggatggaaaaactttttggatatttggagaaattttaaaacaatttggcttatctcttcagtaagtaatttctcatccagaaatttactgtagtgcttttctaggaggtaggtgtcataaaagttcacacattgcatgtatcttgtgtaaacactaaacagggctcctgatgggaaggaagacctttctgctgggctgcttcagacacttgatcattctaaaaatatgccttctctttcttatgctgatttgacagaacctgcatttgcttatcttcaaaatatgggtatcaagaaatttcctttgctgccttgacaaaggagatagattttgtttcattactttaaggtaatatatgattaccttatttaaaaaatttaatcaggactggcaaggtggcttacacctttaatccgagcactttgggaggcctaggtggacgaatcacctgaggtcaggagtttgagaccagcctggctaacatggtgaaaccctgtctctactaaaaatacaaaaattagctggtcatggtggcacgtgcctgtaatccaagctacctgggaggctgaggcaggaaaatcgcttgaacccgggaggcagagtctgcagtgagttgagatcacgccactgcactccagcctgggtgacagagcgagactctatctcaaaaaaaattttttttaatgtattatttttgcataagtaatacattgacatgatacaaattctgtaattacaaaagggcaataattaaaatatcttccttccacccctttcctctgagtacctaactttgtccccaagaacaagcactatttcagttcctcatgtatcctgccagatataacctgttcatattgtaagatagatttaaaatgctctaaaaacaaaagtagtttagaataatatatatctatatattttttgagatgtagtctcacattgtcacccaggctggagtgcagtgatacaatctcggctcactgcagtctctgcctcccaggttcaaatgcttctcctgcctcagccttctgagtagctgggattacaggcgcccaccaccatgtccagctaatttttgtatttttagtagagatggggtttcaccatgttggccaggctggtcttgaactcctgaccttgtgatctgtccacctcggcctcccaaagtgctgggattacaggtgtgagccaccatgcctggctagaataataacttttaaaggttcttagcatgctctgaaatcaactgcattaggtttatttatagttttatagttattttaaataaaatgcatatttgtcatatttctctgtattttgctgttgagaaaggaggtattcactaattttgagtaacaaacactgctcacaaagtttggattttggcagttctgttcacgtgcttcagccaaaaaatcctcttctcaaagtaagattgatgaaagcaatttagaaagtatctgttctgtttttatggctcttgctctttggtgtggaactgtggtgtcacgccatgcatgggcctcagtttatgagtgtttgtgctctgctcagcatacaggatgcaggagttccttatggggctggctgcaggctcagcaaatctagcatgcttgggagggtcctcacagtaattaggaggcaattaatacttgcttctggcagtttcttattctccttcagattcctatctggtgtttccctgactttattcattcatcagtaaatatttactaaacatgtactatgtgcctggcactgttataggtgcagggctcagcagtgagcagacaaagctctgccctcgtgaagctttcattctaatgaaggacatagacagtaagcaagatagataagtaaaatatacagtacgttaatacgtggaggaacttcaaagcagggaaggggatagggaaatgtcagggttaatcgagtgttaacttatttttatttttaaaaaaattgttaagggctttccagcaaaacccagaaagcctgctagacaaattccaaaagagctgtagcactaagtgttgacatttttattttattttgttttgttttgttttttttgagacagttcttgctctatcagccaggctggagtgcactagtgtgatcttggctcactgcaacctctgcctcttgggttcaagtgattctcatgcctcagcctcctgtttagctgggattatagacatgcactgccatgcctgggtaattttttttttttcccccgagacggagtcttgctctgtcgcccaggctggagtgcagtggcgcgatctcagctcactgcaagctccgcttcccgagttcacgccattctcctgcctcagtctcccaagtagctgggactacaggcgcctgccaccacgtccagctaatttttttgtatttttaatagagacggggtttcaccgtgttagccaggatgatcttgatctcctgacctcgtcatccgccgaccttgtgatccgcccacctcggcctcccaaagtgctgggattacaggcatgagccactgtgcccggccacgcctgggtaatttttgtatttttagtagagatggggttttgccatgatgagcaggctggtctcgaactcccggcctcatgtgatctgcctgccttggcctcccaaagtgctaggattacaggcatgagccaccatacctggccagtgttgatattttaaatacggtgttcagggaaggtccactgagaagacagctttttttttttttttttttggggttggggggcaaggtcttgctctttaacccaggctggaatgcagtatcactatcgtagctcacttcagccttgaactcctgggctcaagtgatcctcccacctcaacctcacaatgtgttgggactataggtgtgagccatcacacctggccagatgatggcttttgagtaaagacctcaagcgagttaagagtctagtgtaagggtgtatgaagtagtggtattccagatggggggaacaggtccaaaatcttcctgtttcaggaatagcaaggatgtcattttagttgggtgaattgagtgagggggacatttgtagtaagaagtaaggtccaagaggtcaagggagtgccatatcagaccaatactacttgccttgtagatggaataaagatattggcatttatgtgagtgagatgggatgtcactggaggattagagcagaggagtagcatgatctgaatttcaatcttaagtgaactctggctgacaacagagtgaaggggaacaccggcaaaagcagaaaccagttaggaagccactgcagtgctcagataagcatggtgggttctgtcagggtaccggctgtcggctgtgggcagtgtgaggaatgactgactggattttgaatgcggaaccaactgcacttgttgaactctgctaagtataacaatttagcagtagcttgcgttatcaggtttgtattcagctgcaagtaacagaaaatcctgctgcaatagcttaaactggtaacaagcaagagcttatcagaagacaaaaataagtctggggaaattcaacaataagttaaggaacccaggctctttcttttttttttttttgaaacggagtttcgctcttgtcacccgggctggagtgcaatgatgtgatctcagctcactaaaacctctacctcctgggttcaagtgattcttctgcctcagcctcccaagtaactgggattacaggcgtataccaccatgcccagctaatttttgtgtttttagtagagatggggtttcaccatgttggccaggctggtctcgaacttctgacctcaggtgatccactcgcctcagcctgccaaagtgctgggattacaggtttgggccactgcacccggtcagaacccaggctctttcttatacttaccttgcaaacccttgttctcattttttccctttgtatttttattgttgaattgtaatagttctttatatattctggatactggattcttatcagatagatgatttgtaaaaactctcccttcctttggattgtctttttactttcttgatagtgtcttttgaagtgtaaaagtttttaattttgatgaagtcgagtttatctattttgtctttggttgctgtgcttcaagtgtcatatctaagaaatcattgtctaatccaaagtcaaaaaggtttactcctatgttttcttctaagaattttagagttttacatttaagtctgatccattttgagttaatttttatatatggttcaggtagaagtccaactttattcttttccatgtggttattcagttgtcccagcactgtttgttgaagagactattctttccccatggaattatcttagtacccttgttgaaaattaatcgtccttaattgtataaatttatttctagactgtcagttctacctgttggtctttatgtcgatcctgtgccagtaccatacagtcttgattactgaagtttgtgtcacagtttaaattcatgaaatgtgagttctccaactttgttccttttcaagattgatttggccatgctgggtcccttgcatttccgtacgaattgtaggatcagcttgtcagtttcaacaaagaagccaagtaggattctgagagggattgtgttgaatctgtagatcaacttggggagtattcgcatcttaacaatattgtcttccacctatgaacatgggcaaactttgtgtaaatggtcagattgtaagtatttcgggctgtgtgggcacagtgtctctgtcacagctacgcggctctgccattgtagcatgaaagtagccataagcaatatgtatgagtgtctgtgttccaatagaattttattaatgacaaggaagtttgaatttcatataattttcacctgtcatgagatagtatttgattattttggtcaaccatttaaaaatgtaaaaacatttcttagcttgtgaactagccaaaaatatgcaggttatagttttcccactcctaggttaaaatatgataggaccacatttggaaagcatttctttttttttttttttttttttttttgagacggagtttcactcttgttgcccaggctggagtgcagtggcgcgatctcggctcactgcaacctctgcctcccaggttcaagacattctcctgcacggcctccctagtagctgggattacaggcatgcgccaccacacccagctaattttgtatttttagtagagacggggtttctccatgttggtcaggctggtcttgaactcctgacctcaggtgatccacccgcctcagcctcccaaagtgctgggattacagggtgtgagccaccacaccctgctggaaagcatttcttttttggctgtttttgttttttttttaaactagttttgaaaattataaaagttacacatatacattataaaaatatcttcaagcagcacagatgaaaaacaaagcccttcttgcaagtctgtcatctttgtctaacttcctaagaacaaaagtgtttcttgtgtcttcttcccagattttaatatgcatatacaagcatttaaatgtgtcattttttgtttgcttgactgagatcacattacatatgtatttttttacttaacaatgtgtcatagatattgttccatagcagtacctgtaattcttattaattgctatgtaatattttagaatttctttttaaaagaggacttttggagatgtaaaggcaaaggtctcacatttttgtggctgtagaatgtgctggtgacatattctctctaccttgagaagtccccatccccatcacctccatttcctgtaaataagtcaaccacttgataaactacctttgaatggatccacactcaaaacatttagtcttattcagacaacaaggaggaaaaataaaataccttataaagcactgtttaatattgtattaaattggatcaatttgggggctagaatgtatgttagagacatgatatgtccataggtccttgctatcacagtgaggtctcagggacagtcgtttggtatcatttgggatctcataagcagactctctctgcttgacctgacaaatcagagtctgtgttttaacaggttcagtgagtgacttacatgcacattggagtttgggaagctccactgtaggtgcttagaccttacctttgttgttgctaataacaatgcaagcatttgggaggaagacctgtgttgctcatatgtgtccaggtgtagctgaggtggccttgcttatctgctgtagggccgttgagcatttctgtagctgtgatgagtgagctgaggtgagcctgcggagagctcccagccattggtagtgggactcgcttagatgaactggaaggaccctttcatctgagcagccactatggagaaaaacaaccgaatgaggggagagacaatgtgcaattttatttagggcacaaaggagagctgtggttagaaggtgacatttgagtggaaagggggcaagccatgtgtatagcgggagaagagaggtccaggcagagttaacagaaggcagaaatgctttccatgtttgagaaccagtaaggaggccagtggctgaagtaaggtgaagggcagaaataaggatgaggctgcgagagatgagaggttagagacgagcgtcttgtgcaccaagataagcttgtgtggtcaaaacaagtagtttaatttatgtttttaaaagatcattttggctgggcacaatggttcatgcctgtaataccagtagtttgagacggtgtggtgggaggattgcctgaggccagacgaccagcatagccaacatagcagcacctataaggtctctacaaaaaactttaaaaaattagctgggcatagtggtgtgtgcctgtagtcccagctactcaggaggctgaggaggctggaggattgcttgagtccaggagtttgaggctgcagtgagctatgattatgccactacactacaacctgggcaagagagtgagaccctgtctctaaatatacacacacacacacacacacacacacacacacacacacacacacacacacacacacatatatatgtatatatatgcatttagatgaaaagatcactttgacaataccacatgctggtgaggatttagaaaaactaggtcacttattgctggtgggaatataatatagtacggccactctggaaaacagtttggcagtttgtcataaaactgaacataccgttagtatacagcccagcagcaactacaatcctgggcattaatcctagagaaatgaaaccttaatgttcacataaaaacctatactcaagtatgcatagcagctttacccataatatctaagaactggaatcagctcagatgtccttcaacaggtgaatggttaaactactcagtaataaaaaggaatgagctactgatagcatgcaacagtttaggtgaagttatgctaatgaaaaaagccaatcccaaaaggttatacatactgtatgattctatgtttttttgcaatggcacagttttagggatggagaatagattagtggttgcctggggttagagatggggtagtagagtaggttagtggtggcagaggagagaaaagagagggaggtgaatgtggttataaaaggacaacacaggggaatacttgtaatggaaatgctttgtctttttttttttttttttttttttggcgacagagtcttgctctgttgcccaggctggagtgcagtggcatgatcttttctcactgcaacctctgcctcctgggttcaagtgatacttgtgtctcagtctcccatgttcagagtgaaacaaaccagaggtaatgttcatccaaataatccaacacacatgacattaaaacatcaagatcaggtcggacgtggtggctcatgcctgtaatcccagcacttttgggaggccaaggtgggcagatcacttgaggtcaggagttcgagaccagccgggccaacatgatgaaaccccatcttgactaaaaatacaaaaattagccgggcatggtggtgtgcacctgtagtcccagctacttgggaggctgaggcaagagaactgcttgaacccgaggggcagaggttgcagtgagctgagagtgcgccattgcacttcagcctgtgtgacagagtaagactccatctccaaaaaaaaaaaaccaagatcaattaaaatacagcattactgggccgggtgtggtggctcacacctgtaatcccagcactttgggaggccgagatgggcagatcacgaggtcaggagatccagaccatcccggctaacacggtgaaaccccgtctctactaaaaaatacaaaaaattagccgggtatagtggtgggtgcctgtagtcccagctacttgggaggctgaagcaggagaatggtgtgaacccgggaggcagagctggcagtgagctgagatcgcgccactgcactccagcctgggcgacagagcaagactccgtctcgggggaaaaaaaaaaataaataaatagaatgctgtagtgtccttgagtttacatgcccctccttacgcttgtgtgcccgtgcagattgcttgattacacaattagaggaggctggcggaggattgttttaatttttttttttttgagacagtctggctctgttccccaggctagagtgcaatggcgcaatcttggtgcactgcaacctctgcctcctgggttcaagcagttcttctgccgcagcctcccgagtagctgggattataggcgcccgccaccacgcccaactattttttgtatttttagtagagcagcgtttcaccatgctggccaggctggtctcgaactcctgacctcagatgatctgctgccccagcctcccaaagtgctgggattacaggcgtgagccacacctggccgtttgttttaattttgaaggtgaagtgaaagtgactacatttaccaaaagtgattgaaaagccaggactgttcttaccctgtttttccagttcttgctcagagcaaggtggtttctttttcacttaatcaccatacttacttttcatgtagaacaagtcagtttgagttatcagttcatcatcttaactaaattccatgggggaaggaattagttttagtttcttaaacttccaggtttgcttattggacaaaatgagatagcaaggcagtgtttttaagttagattttttatttctttggtaatacaattttctcagaaacttagtagtcttttagtttagttgtttttagttggtcctatgttttggatcacccctctctactttattttgatagtgccaactgtgaagacatctgaagccataggtttggatgggaaggaggcatctttagcctgatcatcttcgccaggctgtttatctccttttgcttggctgagaagtcttaataggaggcttattcccagctatttggggacatagaagcagttagccattgcttatattttactgaggtctgtgtggtatgttgattgtagtcagttaacgattttgagaactgaaggcagcctggtatatatagagtaggtattagactgtgtttcttctaattgaatttcccatctcttgtaatctatgccatcatcttctgtactgctgagaaagaaagaaagtttctaatcaaactataccactggttgtaagatgcagtttggctttagtgatgttaacacatgattcaaacgtgaaattgattgagtattggtgaaatacagaggagatttaaagccagaagacctgggtttaaatgctggctgtatgacttcatatctgtgtgatcttgggcatgtcatggttggcacttcaatttcttctctctataatgggggaagtgaggccagtcatggtggctcatacctataatcccagtgctttgggaggccaagatgggaagatcgcttgaggccaggagtttgagcaattgggcaacatcgtgaggccccgtctctacaaaatattttgaaaaaattagccaggcccagtggtgcgtgcctgtggtccgcgccactcaggaggctgagacgggaggatcctttcagcctaggagtttaaggctaaagtgagccatgattgtgctatcgtactccagcctgggcagcagagcaagatcctgactctaaaaaaaagtaaaataaagtaaaatgggggaaatgaactgctttagtaacatcatctgttttttctgtgagcagcgtagcttgacagccattggtgaactcgtgccctgtgcttccctgtccagatccccattctgcccgcaacatggagtataacggtttattcatagtagtcgagaaacactcactgaatgaatgaatgaggtgtagaactaagtggagtgggtaattcaacacatattaatttccttcttttttttatttttagaaagaaagaactttcagctaccaagaaagaccgtgtgaatcattgtctgacaatatgtgaaaacatagtggcacagtctgtcaggtaattgcactttgaactgtctagagaaaataagaactttgtatattttcagtcttaatgggctagaatattctttgtgtcccagctattttaaatggattcagaaatccatttaagatgaagaaggacccttttcccatatttctggctatatacaaggatatccagacactgaaatgaataatgttccctttttgtaatcttttatgcaaaaattaaaaccattatggtaattgaacaacatgtttatgtttagttaacacccttagcaactatagttattttaaaaccatctatggtttgatatttttgcatttgttgcaatagtaggaacagcacaagacagttcagtttgtctctcttatttgctttttcttggcagtttgctgtcctattgtacctctgctcctagcagtggctggagcccactcctctgtgcttcgggattagtggggatcgtggggcattgactgtaggtcagctttccttgcttgatctttctcactgggatgaactagcagcaccttcttttgtagctgctttgcttttgactatctttctgaccgttgttcctagtagctgtagatggtaaatatatttaggcctgtttccaatggctcagtaggagacatattcacctatgatatctgaattctgttacccacatgggcatgcgtgaaatagttgccttgccttactttcccttggaataaataattcatgttattctcctggtagaagctagaaaaagcctttatagtcagtcagaaaaaaatttttagacaaataatcttgattttagtactgacaaaaacgtgtggtgattctttttttaatttttttttgagacggagtttcactcttgttgcccaggctggagtgcaatggcgtgatctcggctcactgcaacctctgcctcctgggttcaagtgattctcctgcctcagcctcccaagtagctggagttacaggcatgtgctactgtgcccagctaattttgtatttttagtagagatgttggtcaggctgatctcgaactcccaaccttaggtgatctgcccgcctcagcctcccaaagtgctgggattacaggcgtgagccagggcgcccggtgattcatttgttttttcaaaaaatttcctcttggccattgcttttcacttttgttttttttttttttttgagacggagtcacgatctgtcacccaggctggagtgcagtggcatgatcttggcttactgcaagctctgcctcccaggttcacgccattctcctgcttcagcctggcgagtagctgggactacaggtgctcgccaccacacccggctaattttttgtatttttagtagagatggggtttcaccgtggtcttgatctcctgacctcatgacccgctcaactcagcctcccaaagtgctgggattacaggcgtgagccaccgcgcccggccctctcttgtctttttattgtggtaaaatgcacataaaattgactgtcttaaccatttttaggggtacagttcagtatatatattcgtaatgttgtacagccatcactgccatctacttcataagtttttcttctgtcaaaactgaacatctgtcttcattaaactccctatcatccattctttcctgtagtccctttctactttctgtctgtatgagtgtaactgctctggagacctcatgtaagtggattcctacaggatttgtgttttttttttggtgatctgcttatttttaatgcctctgtgcatttgtattatatactttcaaagtgatttcacaaaaccgtttcattttaggttaactcatttctgttgtttgtgaaatactgtgtatgattctgttctgtttctgtctaatttgtggaaatgttgtgggaagaaaatgaaataacaaatgagcatatgtcctgaaaataaaaatataaaaattctaagttagcatgctattgtagaatacaacgctatgataaaagtaggaaaaaaaaaggtttgaattctatctctgctacctgtgtaagctgggtgactttagataagctgtaacgtgtttgagccttactggctcatttttgaaatgtaatccctagttacacagttcttgtgggatcagatggtacatgtgaaacactgtgaaaaagcaactgcatagatatgttcattagccacctgagcgggaagcgtatcccattgcgatgcccatcatccaaagctatatgttatctttacttttttttttttgagacagagtcttgctctgttgcccaggctagagtgcagtggtgcaatctcagctcactgcaagctccacctcccgggttcacgctattctcctgccccagcctcccaagtagctgggactacaggcacccgccaccatgcctggctaaatttttgtatttttagtagagatggggtttcaccgtgttagccaggatggtcttgatctcctgacctcgtgatccgcccgcctcggcctcccaaagtgctgggattacaggcgtgagccactgcccctggccatctttactttttttgtgaaatgactttaaatacttggcaaacatttggtcattgttcatctgatctccaccatccaggtctcagagaacataatttctctctgaaagcttattgacccaggaaataagatctctttcaatctgagtgcgtcaggctttattcttgtcattttgtcttttgataattttcaaatggaattcatggaatgttggcttatattcatatattagtaaagtatgttgagacatcttaagattgatttgtggttctatatgccatattaaatcaaaataatagctgttaatggttttcacattagtctgtctcttgtttttatggagtaatgctgagagttcattatgcttgttctacagaagagcatgttaaaaggagtttttggagtcagagaggttattcttggtttcataggatacactctatactttttagggatttcagagtatatagctgaaggtgatattttatgtaaatatgttttatggaaacttattgctcatcgctgtttcctgttaactctcctaaaatataattaaacttttggaacttttttatagcttttgtgctagactaatttttgtctctaatgaggttatataaatggcagcttctgacgttttcaatgtaggaagtcatttaaaacttcatgtatattgtgaaaatgtagtctgctttaagctctctaaagtggtctaagttactggttcctaagtatggatgagcatcaaaatcatctggaaaatttgttaaaaatacagtaatgaaggcacctcactgtcctttttcccaaacatacttctgcattctgtttgagtaggtagggactacacatttttcacaagtatcctcttgggaatacccaggaatgcttacttgagcaacctcttactaatatgtaccttgataaggtggctaggtaaacataaatatacaaaaatccatagatctcccatatattagcataaatcagctagaaaatataacgtttaaagatctagttcacagtagcaccaatatatcgaactctaaggaatcgataaatatgcaaaaactttataaaaacttctgttaatgtttctgaaagatataggtgaccactttctagataggaagattttatattactaagttgaattttctctaaattaacacagaaatttaaaataatcttgatcaaaattctagtagaggtatttttgaacttgttcactgcaagaataaatacataattgcaaagaatatctcaaaatcatcaccaggcctggtgtggtggcccatgcctgtaatcccagcactttgggaggctgaggcaggcagatcacctgaggtcaagagtttgagaccagctggaccagtgcggtgaaacactgcctctactaaaaatacaaaaattagctgggtgtggtggtgcatgcctgtagtcccagctacttgggaggctgaggcaggagaattgcttgaacccaggaggtacaggttgcggtgagcctagatcgcaccactgcattccagcctgggcgacaagagcaaaattctgtctcaagaaaaaagagaaaaaagaaaaagaaatcaacactaatatggtgagacttaatgtatgtgacattaaaatagtgattggatgttaaaacaggtatagaacagaaagaagagtgtatgtgtgtatctgtatgaatttatgatgggtgtaacatatatgtattagggaaatgagggaaatgatacatttctctgactttgggagaacattatatctctacctcatattgcaaacaaacataaagttcagattaattacctaaatgtgaaaaaatgaaataatttctttaaaaaatgtaatcttagtttgaggaaggttaacattataaaggaaaaaactgttttgagtggaatatagttcaatatgtcaaaatccaccttcaacaaaattgaaagtaaattgaacttggggaaagtattgacagcatatagatcaaaggttactagcctgtgtaaagagcagttataaatatcgttaagaaaaacactgtcgacctgtcggcaccttgttctccgactcccagcctccagaactgtgacgagtaagtgcttattgtttaaaccacccagtctgtatgtggtattttgttatagaaactcaagctgattaggacactagtaatcagtagactgaaactgaaacaaaaataagaaccttttttacctgtcaaattggcaaacattaagaatattcagatttttgtcagaggtgatacaaccttctaagaaggcaatttgggaaaatataaagctttagattattatatgtctgacctagcagttttacctctagggtgcttacccctaggaaagtgtgtaatgatattggtgcagtgcccttcatcccattagaaaattaaaaataaccttaatggcctaccactaaaaggggattgaaaatttaagatatatttatttatgtgtttattgagatggagtcttgcactgtccgcctgggccagagtgcaatggtgcgatctcggctcactgcaacctctgcttcccgggttcatgtgattctcctgcctcagcctcctgagtagctgggattacaggctcacaccaccgcacccggctaattttttgtatttttagtagagatggggtttcactgtgttggccagactggtctcgaactcctgacctcatgatccgcgcccctcggcctcccagtgttgggattacaggtgtgagccactgcgcctggccagatacatttatacaagagaatgttagttaacattcatagatatttatattttgtttactttttattaaaaaaattttttttagagacaggatcttactctgtcacccaggcaggatgcagttgcacaatcatagcccactgcagcctgaactcctgggcttaagtgatccttctgcctcagccttttgagtacctgggggactttaggcagtgctactatacctggctaatttttaaatgttttatagatgagatcttgctgtattgcccaggctggtctagaattcctgggcccaagtgatcctcccaccttggcctcccaaagcgctgagattacaggcatgagccaccacttctgaccaatagatatttatatttgtgactggaaaatatattaacaatgtgttaaaaaattcagttaaaaaataatgaaagatttttgcttctggctaagatagaataacaaggacagcatttatcttcttgccttgaaatagttgaaaacggaagaaatatatgtaacagtggttttcaagttattgggcatcaggcaaagaagaatagttatcccaggaaaatgaatgtggagagccctacaatttccttacattactgcctggtcatggcaagaggaaaaactgagaggagactgaggctgagccagtggtttgctgggttgaggaggcagagctgggagtgcagagatgcaaggtggtgagagcccatatggaagaataccagggaagagagctgcagagggagctccggagacctgcaccctgccctctcagtaccctgtcatgtgtgtagctgagtactgacgagcacttgcttgtgcggaaatgacccagggctggaggtagagccacctgaaaggattagaaggaacagttgctgaaagtcacacagggccaggaagaatttctaatcacaccagttggagtggaaaacctcagctctcatagagcaggtagggtactcagaagggtttgcccacctagccccagactaagtttcgttactctgaccctacctaatattaaaaagagattaattaaattgttcgcaacaaaaataatatatttcagtgtttgtaacacgtagaagtgaattgtatgacaatagcataaaggctggaagagcagaaattgacatgtatttgcgctgggcagaataatgctcccctctttccccaaaagatatcaagtcctaatccctggagcctgtaaatattactttatatggaaaattgttttatgatgtgattaaattcaggatcttgagatgagggggctatcttggatgatctgggtaggcactaaatgcaatcacatatatataaaaaggaggcagagggagattttacacacagagagaaggccctgtgaagatggaacagaaagatttgaaggtgctggccttgaaaattggagtgatgaagctataagccaaggaatgcagcagccaccaaagctggaagaggcacggagcagttctcatttagagcctactccagagggaatgtggtgctgccaattccttttttttttttttttttaagatatcatttacccctttaagttggttttttttttttttttttttttttagtatttattgatcattcttgggtgtttcttggagagggggatttggcagggtcataggacaatagtggagggaaggtcagcagataaacatgtaaacaaaggtctctggttttcctaggcagagggccctgccacgttctgcagtgtttgtgtccctgggtacttgagattagggagtggtgatgactcttaacgagtatgctgccttcaagcatctgtttaacaaagcacatcttgcaccgcccttaatccatttaacccttagtggacacagcacatgtttcagagagcacggggttgggggtaaggttatagattaacagcatcccaaggcagaagaatttttcttagtacagaacaaaatggagtgtcctatgtctacttctttctacgcagacacagtaacaatctgatctctctttcttttcccacatttcctccttttctattcgacaaaactgccaccgtcatcatggactgttctcaatgagctattgggtacacctcccagatggggtggcggccgggcagaggggctcctcacttcccagatggggcggccgggcagaggcgccccccaacctcccagacggggcggcggctgggcgggggctgccccccacctcccggacggggcgggtggccgggcgggggctgcccaccacctcccggacggggcggctggccgggcgggggctgccccccacctcccggacggggcgggtggccgggcgggggctgccccccacctcccggacggggcggctggccgggcgggggctgccccccacctcccggacggagcggctgccgggcggaggggctcctcacttcccggacggggcggctgctgggcggaggggctcctcacttctcagacggggcggctggtcagagacgctcctcacctcccagacggggtggcagtggggcagagacattcttaagttcccagacggagtcacggccgggcagaggtgctcttcacatctcagacggggcggcggggcagaggtgctccccacttcccagacgatgggcggccgggcagagatgctcctcacttcctagatgggatgacagccgggaagaggcgctcctcacttcccagactgggcagccaggcagaggggctcctcacatcccagacgatgggcggccaggcagaaacgctcctcacttcctagacggggtggcggctgggcagaggccgcaatcttggcactttgggaggccaaggcaggcggctgggaggtgaaggttgtagtgacccgagatcacgccactgcactccagcctgggcaacactgagcactgagtgagcgagactccgtctgcaatcccggcacctcgggaggccgaggctggcagatcacttgcagtcaggagctggagaccagcccggccaacacggcgaaaccccgtctccaccaaaaaacacgaaaaccagtcagacatggcggtgcgtgcctgcaatcccaggcacttggcaggctgaggcaggagaatcaggtagggaggttgcagtgagtagagatggtggcagtacagtccagccttggctcggcatcagagggagactgtgcgagggcgagggcgagggcgagggaattccttaatttcagtttagtgatactaattttggactctggcctctaaaactgtgaaagaaaaaattttttgtttgtttgtttcttttaagccacatagtttgtggtaatttgttacagcagctgcaggaaactaatttatgctgcatgtgaaatggtgtaataaggtagattgtgatgaagatacatagtataaacaattaagcaacaactaaaagcacaacaaggaattatagctaatgaaccaaaaaaggagattagaataataaaaatggtgaatcccaaagaagccagaaataggggaagaggcaaataaaggaaagaaagagcttgatggtagatttcaacctaactatgtcaaaaaggacattacatgtaaaaggcagcgatttttcagattgaatggaaaagtaagactcggtatatgctgctgcctgcaagaaacacattctaaatataaaggcaaaaataacctacaggtaacagaacggaaagaagttcactgtgcttacaagaattagatgcaagctagactggttctgttaatatcagacaaagtggatttcaaagcaaaggctcttgcccaggatgagatggtcatttcataatgatgaaggggattcgttcatcagcctggcatagcaagctgaaatgtttatgcaccggactacagagctaaaatacatgaagcaaagcctgacagaactacaagtagaaacagacaaatccacagtgatagagatttcagtagccgctctcaatgatttgtagaacacgtagccataatatctggatctagaacacttgaccaacactgtcccctgtgcaacctcattggcatttacaggacactccacccagcaccagcagaagagacactctctcaagtgctcacagaatgtttgccaagatagagcagatgctgggccataaaacaagtctctaaattaaaagcattcaaattattcagagtatgttttctgacctcagtatcattaagttggaatatattataggaagataacctggaaaagcctcagatatgtggaaaaacccatttccacatggcccatgggtcagaagtgaagtcaaaagggaaatttgaaagtcttttggattgactgatataaaaacaatagatttctaaacttgtggggtgctgttacagcatagtaaatggaaatttctagcattaaatgcctgttttaggaaagaaagatttcaaatcaatgacctcagcttctacctttggaaacttgaaaatgacaagcaaatggaatccagagttaccagaagggccaggtacggtggcttatgcctgcagttctgccactttgggaggccgaggcaggtggattgtttgagactggcagttgaagaccagcctgggcagcctagggagaccccatatctacaaaaaacaaaaaaattagccaggtgtggtggcatgtgcctgtagtcccagctaaccaggagtctaaggtgggaggattgcttgagtctgggaggttgaggctgcagtgaactgtgattgtgccactgtgttccatcctgggcaacagaatgagaccctgtctcaaaaacaaaaacagttactagaagaatggacatcataaagataggagcagaagtcagtaaaatagaaaacaaaaatacataggaaatcaataaaaccaaaagctggttcatcaagaacatcaataaattggtaaagctgataggaaaaacagtgaagtcacaaattagcaatatcaggaatgagggagatgacagtagtatagattatatagatattaaaaggactgtatgaggcaggtgtggtggttcacgcctgtaatcccagcaccttgggaggccgaggtggacagatcacctgaggtcaggagtttgggaccagcctggccaacatggtgaaactctgtctctactaaaaatacaaaaattagttggtcgtggtgctgtgtgcctgtaatcccagctacttgggaggctgaggcaggagaattgcttgaacctgggaggcggaggttgcagtgagctgagattgtgccgttgcactccagcctgggtgacagagcaagactccatctcaaaacaaataaataaataaaaaggactatatggtaatattatgaacaactttatgccaataaatttgacaacttatagatgaaatggatgagttccttgaaagacacagaaactattaaagctctctcaagaagatatagataagctgattagccctatatctattttattgaatttaaatgtaaaaatcaatatttagttactggaaaacttttaagtgtggttggaaatggtatacgaactttttcaactgaattttatgaagtctaatcacaggtaaaggttttctgatgaaaatttagtgtctgaattgagatatactgtaaaaaatgttatatatcttaattatttcttcacattaattacatgttgaaataatactttgggtgtattgggttaaattaaatattatgaaaatcttgcctgttttctttttacttttgatgcgtcagctaggaaatataaaagtgtagctcacattctgtttctgttgacagtactgctttggagcacagtgtttgaatgatctatcatttcaaagacctttcctcagttcgttattcatggctgtctgtattccacatagataaggtctgaaatactgctaagtggcatgttttgttttatgcttttataagtttgttgatcattactgatgtggacttttggtgcctcttaggctcattgctatcttccaaccattgtttgcaatttttacctagagataaagagaaagagacatttggtttcagagtagttagattgggatcatgaaagagcaacctcattttgatgcttcaaaaatagcacatcccccgtattactgggatttgctattcttgggattacttcaagaacatccttgtgttactggtttggatgcttctgaatgctgtgaagtcagtttcatgtacatggctcatcagtttagctctctcttggctttgtttagacagttggagcatgatggcctaaacagcttctttcaattaaacattttaaaatagtttacaaatagtaaacaaactccagtttttgtgactctttgtctcgcacaacaaaaacacaatctgaccatgatcatctggcatcttagggtgaaatatggttatactttggcccataccgaaagcaagattaaaaaggggcaggagagatagactgctgaactgattttcaaggttccaagaatattgtaggttaagagtaaaagtaaacttttggtagaaagcagtgggttgtctaggattgaagtatctgaagtttttaaacgaaaatttaaaaagaaaaatgagaattgccttacaagtacaatctcttcttttttaaaaaataaactttattttgaaatagttttagatttatagaaaaaaattagatagggtaggaagttttcatataccctacatccagttaccccagttattatcatcctaatttagtgtgagacattttcatgtttaatgaatcaatattgatatgctattaacttaagtccagactttattcagattttcttaatttctatgtaatgtcctttttctgttccagaattccatgcaggacaccggatacctcattacatttcattgtcatgtcaccttaggctcctcttgacagtttctcttctttttttgcttagaaattctccagaatttcagaaacttctgggcatcgctatggaactttttctgctgtgcagtgatgacgcagagtcagatgtcaggatggtggctgacgaatgcctcaacaaagttatcaaagtaagaaccgtgtggatgatgttctcctcagagctatcattgttgtaggctgagagaagaagcgatcattgagtgttcttctgttttgagtccctgaggatgtctgcacttttttcctttctgatgtatggtttggaggtgctctgttgtatggtttggaggtgctctgttgtatggtttggaggtgctctattgtatggtttggaggtgctctgttgtatggtttggaggtgctcttgtatggtttggaggtgctcttgtatggtttggaggtgctctgttgtatggtttggaggtggtcttgtatggtttgcaggtgctctattgcatggtttgcaggtgctctattgtatggtttggaagtgctcttgtatggtttggaggtgctcttgtatggtttggagatgctctattgtatggtttgcaggtgctctattgtatggtttggaagtgctcttgtatggtttggaggtgctcttgtatggtttggaggtgctctgttgtatggtttggaggtgctctgttgtatggtttggaggtgctcttgtatggtttggaggtgctctattgtatggtttggagatgctctggtatctgcctgcattgcttgccacacctgcccggtcagaaggcgctatgttgacaattgtgcctgcacggtgcctaggtcaatgaagggaaccgatggtagccactggatgctcctgggaaaatgtcactacaggcaccagagaagccagagctatgcccaaatttctatgagtctcagttttcttaaccataaaatgggatcaatgtttttgtggcatgtgtatgagtgtgtgtctgtgtatgtgtgaggattaaattgtgtatgtgtgaggactaattgccactactggatcctcaaagtggtaagaagtgttcttattaataatgacatccttacactcttacccagcaagattgatgggtgtggcactgcttctctttttccatcacatggtttccatggtatccttttgcccagggaatctttgctttgtggctagcactttgttgtttggctaatcacgctttctgtggtcaggacgctggcttctctggagccatgggattctagctccctgtcttgtccctagagtggtcactgtcttctctctccgcttgcaattcctgctttgctcgcatctcacttatgcagtgacgtatatcagtttcaccttgttctccgtgcctgctgatcattggcaccacttgcatggtgccatttagggcctgcttccagttaagcttgcttctccacaggcctaaatatccttgcttgcttcttttattctcactggcaggaccagggcggtctgtctttgcatgagacagggtctcgctcagtcacccaggctggagtgcagtggctgatcacggctcattgcagccttgagctaccgggctcaagctatcctcctggcttggccccttgagtagctgggactacaggcgtgcaccaccatgcccagctaatttttaaaattatttgtagagatgggatctcgccaggttgcccaggctggtcttgaacgcctgggctcaagtgatcctccctccttggtttcccaaagtgctgggatcacaggtgtgagccactgtgcctggcccttgatgtttcagttcttgatatttgatcctcagagtcagaaaatctaaaaagagggctatcccaggttgccttggttcatggcaaatgggacgttaagagggcagagagaatatgaacagaaactgttctaatattggtcatttaatgtgtaagtattgttcttttttaaacctccttcattttttttccaggaattgctggacacagtggcttggtgtgtgtctgaggactgtaggccatggccctaggttgtggttttaggtctcaggtgctcttcctggctgtctccttgcttctttcccatgtcctcttctttgtttccagccatttctcccttatgcttaagtttggtgcagcagggtttggctgctctcagattcctgcttcctcagatgctgtagttgtcaggcccagcgggctggcagcgggatcaggatctggctaggtttgctctcactgtggcagagtagggggaggcgtgggagagcacgtgtgaccccaggccagctgtagggagcataggcatggtcacgtagccttcaggtcctagactttgtcttctcatgagtatggctgtgtgtgtatggtgaaaactaggttctacttagcccaagaaaatgggcacattttgcatgtggtttctgtagagaaatgcactgggtatctgacatagcctggcagcatgcctccctcaggtaggttagtctcaggcggtgaagcacgtgtgtccagcaagaacttcatatgtggcataaagtctccgttctgtgaggtgctggcaaatcaccaccaccgtcaagaggctgaagtgatttttgtctagggaggcaggaaaggcttcctggagtcagcagccagtaggtgaaagagtagattggagaccttcttaatcatcaccgcctcttgtctcaaggggtgccaggaagctgtggaggctgaacccatcttatgctgccagagagtgggacaccatgagggtcaggtcaaggggttgtaccttgtttggtagagaattaggggctcttgaagactttggatgtggtcaggggagtgtatcatttaggaagagtgacccggtgaggacgtggggtagaggaggacaggtgggagggagtccaggtgggagtgagtagacccagcaggagtgcagggcctcgagccaggatggtggcagggctgtgaggagaggcagccacctgtgtgtctgcggaagcaggggcaagagggaagaggccagcagcgtgctgccatcacccagcgactggcgtagattgtgagagaccattccctgctcttaggaggggctgagttttagttttctcttgttatacaataagcttggtatttgtttacaaaacatttgtaaagctaaatcaaggtttgataaggcttctagttttatttaagaagtaatgttgaaataaatgtttgtccaattcgctttgctcatttaaggactttcagtacaaactgcaacaacaggattaggatttaaacgtttctgagatgtttttactcctcagaatttcccagaatgtgatctggttttgattttcaagcttgctgacccaataggttaacccacaagttttacgaagaccatctcagtccacttacatcaactgcccatgccacggttaaagagatcatcgactgatgtttggcacagcttcctccctcttgggtgggcaagcatttggaagagaaggctcctatgggtgagagtggggcaccaaagtcttccctgtcccatcccctagcttgagaagcccttctctaatgtggactttgtgccgttagcatcgttactagcttgaagttgaccatctggacgtactttctggtttagcctcacaagtgagcaaggagggttgagagatgtgctgtgaggaatgtggggccccagctggcagcaggctctgggtcaggggggcagggaccacgggcatacctgacagtgaggaggggccacacctgcagaaaaggatgcaggactccgccttgggaagtgttctaggccagagcgagggtctgtggtttataagtacacccacagtgctcgggaccctgcagatgtccagggtgccgtctgagcccgtatcatccaacagaatgttctgctagtgaagattaaagatttactccaggggctttaggatttattatatatatataaatcctatatatataattttttttttttttttttttgagatggagtttcgctcttgttgcccaggctggagtgcaatggcgtgatcttggctcactgcaacctccgcctcccgggttcaaactattctcctgcctcagcctctcgagtagctgggattacaggcgcccaccaccacacccggctaatttttgtattttttagtagagacggagtttctccatgttggtcaggctggtcttgaactcctgacctcaggtgatctgcccgccttggcctcccaaagtgctgggattacaggcatgagccaccccacctggccaggatttattgtatttgaaccatctaccattttaattttgatgttatgtagtatttgatgataatgaaagttaaattgtttttctttccatttttctgtttaagtgaatgacctgtatctagtttattcagtaacttcctgcatatatttgtttctttcattcttaatgaatatattcttaatttagttgctattatgttttgctttgccccaaaattgaaatcttagtttccttttagctcgttttagaactagtgatgggatgtgtcttccataaatctcttgtgatttgttgtaggctttgatggattctaatcttccaaggttacagctcgagctctataaggaaattaaaaaggtgggccttgcttttcttttttaaaaatgttttaaattttaaatttttataggtacacgtattttgtaggtacatgtaaatgtatatatttatggggtacatgagatattttgatacaggtatacaatacataataatcacaccatggaaagttggatatccatgccctcaagcatttatcctttgtgttacaaacaatccagttacatgctttacttattttattttatttttgagacagagtcttgctttcacccatgctagagtacagtggcatgaccttggctcactgcaacctccgcctcccgggttcaaccgaactttgggctggtctcaaactcctgacctcaggtgatccgcccgcctcggcctcccaaagtgttgggattacaggcgtgagccactgtgccgggcctgattgtacattttaaaataactaaaacagtcagggcacagtggctcatgcctgtaatcccagcattttgggaggctgaggcaggtgatcacctgagatcaggagttcgagaccagcctggccaacatggagaaaccctgtctctactaaaaatacaaaaattagccaagtgtggtggcgggcgcctgtaatcctggctactcgggaggctgaggtaggggaatcgcttgaacctgggggtggaggttgcagtgagccgagatcacgccactgcattccagcctgagcgacagagtgagactttgtctcaaaaaataaaaatgaaataaaattgggccgggtgtggtggctcacaccttagtcccagcactttgggaacctgaggcaggtggatgcttgagaccaggagtttgagaccagcatgggcaacatggcaaaacgctgtctgtacagaaattagctgggtgtggtggtgcacaactatagtctcagctacttgggagattgaggtgggaggattaattgagcctggaaggttgaatctataggtagctgagattgtgccactgcccttcagcctgggcgaccaagtgagaccctgtctcaaaagaaaaacaaaaaaacaaaaaacaaaccactattatcgactatatattattgtctatgatccctctgctgtgctgtcgaataccaggtcttgggcccttatttccatcactgagcaaacttcactctgttaagcagcaggtgtgggatttcatcgttattcagtaattcacaatgttagaaggaaatgctgtttggtagacgattgctttacttttcttcaaaaggttactctttattagatgagatgagaattaaaaatggtaacttactttatatctttataattgaagcccactagaccttaaagtagttaccagatgttttatgcatttaaatggccttttctctaaaattagaaagtaacaaggaaagaaaatgcttcgtttctatgcaaccctcttggtgactagtatgtgactcttaatgcaaccctcattgcaccccctcagaatggtgcccctcggagtttgcgtgctgccctgtggaggtttgctgagctggctcacctggttcggcctcagaaatgcaggtaagttgtacactctggatgttggtttttgtcgggggccagctgctactgatcctttatgtctcagctcagatgtcatttcaaaagtctgctctgccctctccaaattgcagtcgaccttgccctgtttatgtttccctcatagcactaatccatgtcagaaattgtcacgtacagtctatctgtgtgcttgtttattttctatcccacccttccgcaagagacttatgggatgtgtgccccaggacagcaggggtcttactgtcttatgctctgttgcagcccagcagcgataacagtgtctgcacatagtacttgcttaaaagatacttgccaaattgttgaaggttgaggtaccaatttcattattgctgactataggagttatagcaaaatatccatttgtctgttacatgagttaaaaatatggttgttgcactgtgaatagtttggtttagtcaaaacagttgtatcttaacggattgagaaacaaaagcaggaccacttttcatcagctccctccttctccttaaccagcaatacatgctgatgctgatatcccatagaccctcagctccatcctgagtcactgggaatgtggtctaaaccctcactattaatatgaactgagtttcaataagaatcttatatgggtcgggcatagtggctcatacctttgatcccagcacttcaggaggccaaggcaggtggattgcttgacccagactaggcaacatggtgaaacgccgcctctacaaaaaatacaaaacttagccaggcatggtggtgcgtgcctgtggtcacagccactcgagaggctgaggtgggaggatcacttgagcctgggaggtggaggtcgtgttgagccaagatcgcaccactgcactccagcctgggcaacagagtgagacctgtctcaaaaaaaccaaaatccagaaaagaacttatatggctgcagaggtataatcactaaggaaatttccttttgtataatcttttttcttttactatcatttaaaaaaatgtgttatatttctgaagcaacacatccaggttctgcacatagcagccaaagtgaccttaaagaatataactgggtcttgtcattcccttatttaaactcttgtacccatttcccagtgccgtttagatagagattccagactcgtcaatggctctgtcacctcagacaccctgcattgactcattagtctgattagagtcaggtttttcttcctcctgatggtttttttttcccccttagttctcagcggaacagtcacttccttagggaggtttccccagccaccctctgaggccgtgcttgttgccagactctgccactagagggcagggctgcaccactcctggcacctcgcacccggcctgccctgtcactctgtgtgttgggtgaattcctgtgatctgtgactcactgctctgtgtcctacacattcggcttttcttctctccccacaaccccattttataattctcctttttcaggaaagctttattcccatttaaaaatttttgtttttaaaatggtattttcttacacttattttctaattaaaaatgagtgttttaagaagtattatgatttactgcaaataatttttaaacccagccttttagatcctctgtgatcataagagaaatgaaggatgtctcccaacacttgagcttcatccacatttcatcctcctgttctttcagctgagttttccccatcccattagggactgttggaatataaaactggcttttccctaacagggaatgaattgcttctgtttctcctgaaggagagctggaagaatgacttgcgttcttttgcatacacaggccttacctggtgaaccttctgccgtgcctgactcgaacaagcaagagacccgaagaatcagtccaggagaccttggctgcagctgttcccaaaattatggcttcttttggcaattttgcaaatgacaatgaaattaaggtatgattgttgcctcaggtcacaaacatgcgagtgatgctgtgagtgagtctgtggagggtgagggcttctgaacagggagtcctgtgggagtgcttcttggggtatgttgtatgtcgtaatttagactaccatcatttgtgttatttttgaggcacctaaggacttctttccacttctcatttcttactgtggggtgaagagttgaattgggagatggtttctagatgcaaattgaaaaggcatttttccagagcagatttgttttcggcgtactagagtgactctttaacctagctgcgggaagatgactgtgccaagactgcaggtaggagaaagctcactgacgaggccttgtgggtctgaacgtcctgcagctatcagagcctgttggcttcctgttgtgcattccaacaaatcatcttcaaacccactttagtgttttgtttataatgtccagaaatagtgaccctgtcacatgctctacagattacaggattcttagcctcttcctttttggtaggtcagtcctgggtttgagcccaagtgaccctcctgggaggtgatgatacacactgggtagagtggaatcagatggacttggattagaattctgtcctctttactagttattttcctctaggcaaactgcccaacagctctaagctatttccttcgtattctgaaaaataagccttaatgggacccatatagggcaactctgagagtaaaataaaggaatatgtgttagagtgtagcatagtcacccacgggaagggcttagatgttagctgctactgctcttattagctgaatgatttggaataaactgttagcctctctcatgttttttctcttgagcttcgaagttttcttgttaatactaaggagatattcaaactagtcatggggttttggaatgacgaagggagatgatgaatctaaagaatttagtgtaatatttcttcatgctcagtaaatggtagtttctgctgctgttatttttattaccatctctttggaatgggagtaggtgctcctttgtggtcagaggctgtgagagctccacagcgccagtttgcccatctgtacactggggtctgttgaaggcagtcccctctgtgatatctctggctgtcagagctcagatgatagatggtatttttgtactcttagttctcatcattttcatgatttcgatcaccatttgagtatgatgatgctaacactttgttgaacgtagaatccgttaattacttccttcctgaacctttggcattaaaaaaaatctattctgctacctctctgctcatttatggttattcaaatttattatcaagagcctggtacagtggcttgtgcctataattgtagctacttgggaggctgaggtaggaggattgcttgaggccaggagtttgagaccagcctgggcaagatagtgagaccctatctctaaaaaaactgaaaaaaaattagctggacatgatggcatgtgcctgtggtcctagctactcaggaggctgagacaggaggctcggttgagcccaggagttggagttcgaggctacactgagctgtgattgtgccaccacactccagcatgggtggtaaaacaagatgccatttcttaaaaaaaaaaaatatatatatatatattatcaatgaaattcagtagtaccaacaggattataaacaaagatagtagttcccttcctactttttctcttaatccttgtgtctcacaggcaaacataactcttagtatttcttccaatatttactttcatgtttctttctttctttctttttttttctttgagatggagttttgctcttgttgccaaggctggagtgcaatgacgcaatcttggctcaccacaacctctgtctcccgggttcaagcgattctcctgcctcagcctcctagtagctgggattacaggcatgcatcaccacgctcggctaattttgtacttttagtagagatggggtttctccgggttggtcaggctggtctcgaactcctgacctcaggtgatcctcccacctcagcctcccaaagtgctgggattacaggcgtgagccactgcgcccagcaacttccacatttctaaataacatgcttctactgctattttttttttcaattttagacatttttttactttcactatagttctatcagaattcagtgtgtacgttattatgcctaagtaaatagtcatggttgcttacgtattatatttctttgattgtgtttcttatttgatgagaaagctgtgttttttgctctgggttgaaactggagagaggacctggggaggaggaggaggacagatgaagttggtgactgtaccttcatggccatagctgggttctcagcacccggggatctgctgatcacctactcataggccaggcccctatcgaagttctaggtgacccagtgctggggacgggggggccacctgcaaggtctaatcatggaggtgggggctacagtgttggcttgtgctggggccagcatccttaggaaggcatcttggaggtggaggagacagccgcccacttcttgattggggccttcagcagcaccagcttcttgggcaggctggtgctggctttcatcaccatgtcgtgttcaatcttcttccagatcctgacttctaggttcagctttcctcagaccctggttcctttcagaggccattgctgctgccttgctctttgctggcttgtgccttgattatatgtctttgtacaactttttgttttcctggagttaatcttcacatctgttttcttggagttaatcgttacctctatatcgcttgcttattattctttggcctttttgtcttctcacaccttccaacttctttgtaatatgtgtttagtacaatttttcatgacaggtagtttactgaatcagtttttccccagtgtggtcatccaacttgagttatccagctctctgccccagtctgggcaggttgatcttcaggtctgtagtacacttgtatcctaggacttctctttgccattagcctggaatttcctttgcagttctcccgttggatgcccagttcctagatgccatatgtttttctatcgtctagtagcttcctgagagaagatgaatgggagggaaattgtatgaggttttgcattcataaaaatgccattttttttcctgtacacttggctgggtatggtgttctggggtagaaatcattttccctcagaaatgcaaagtctttgccctgttgtcttaaaatctccaacgtgacccgattccttaacctatgaatgtacttttctttggaagctttccatttttggggaggtgaagtgctaggtacttagtaggccttttaatttggaaacttacatcccttcagttctgggaaaattttcttaacatttctctgagaagttcttgccttttattttctgtgttctctcctgaaattggttagttggatgttggtcctcctagattgactcacatcttacctttttcttttctttttctggtactttttagatatccatctcaaactcttctattcattgttatgtttttaacttctttcttttctttgtctcttgatggggtcttgccctgttgcccaggttgtggtgcagtggtgcgatcatagctcactgcagcctcaaattcctgggctcaagcagctgttctgcctcaccctcccaagtagttgggactacaggtatgcaccaccacgtccagctattttctttacttttttttttttttttttgagatggagtcctactctgtcgcccaggctagagtgcggtggtgggattttggctcacttaagcctctgcctcccaggttcaagcagttctcctgcctcagcctctcaagtagctgggattacaggtgtgcaccaccatgcccggctaatttttgtatttttagtagagccagagtttcaccatgttggccaggctggtctcgaacgcctgacctcaggtgatccgcctgccttggcctccgaaagtgccgggattacaggcgtgagcccatcattagatctttaaataccagtatctataagtcttttcctcttgagtcagctagtatccctggaaggaaattactcattttcctgcttggaggctataagcttggctatgtttatcctgcaaccggggactggaagggaggggactgacagtgttgctggtcagggtgccctcttactttttgttttctgtgtgcatctcacgtctgtcctcagcctatgtaaacacctcttgagattatccctctcaatctttgccggaggtgggggaggggctgcttcctgggctgccttggattggagggaagacctcaggtgagtgggtgggaatttgcccaaggagccatgagaccagccactatttcaccctctccatccctccactttcagatgtatgtggcgcctccaaagcccgagctcttcttggcgtctgtggcttcaataagcttgctttttgctggtatccctcctaccctcccctgtccccagcaaagcttgcatttgaacttcttcctacgggctaacaaatcagtcagttatgtagctcttgttactttttagcttccgaagttttgttgacacccgtagtctgctaatgtccctgttctgttctttctgttcgtgtaaatatatgctttatacaacttctttacatgatttttgtggggtttctgggtagcagagcttcacaagttcaatccagcgtgttggattagaaatctcccaccctctggtttattcttattctcaaaattacctgccaaacactgatactcccttgtttttccttttcctgacaggaaatgtacataccatacaggacagaaatcattagtgtatcccttggtgaataaccacaaagtgaacttaacccttgtaaccgccacccaggtcaagacagaatattaccaagcactcagaagcctctcccctattcccccgtcactgctcctgccttcctccccaaggtcatgactgctggcttctaattccagagtctgtttttaaattctgtgtacatagaccatggattaagtgttctttttgtctggtttattttggtcgacattaagttcatgagagtcttctatattatcgtgtgtattagtattcctgtagttttaggagcttcatagcattccattgtagggatataccacagtttattcattgtattatcactgggttgtttctagttcttggctattgcgagcagtgctactgtgaccactcttaggtgtgtcttttggagtacatgtgcaggtttccatcttgcacagctagaggtggagttgttgggtgatagggtgtgtgcatctcagctgcagtagaaactgccaaatagctttccttgagtgcttgtaccagctcacccttttgccactgtgtatggggattccaggagctctggtcctcgctagcacttggaattgctgatgcttttactcttagccttcctgatgggtgttttctggaatcacattatgattttaatttccattccttaaagtacccttggctctgaagtttaatgattcatgcatctcttcccttttgaagtactcttacaggtatgttgtgcatgtgttgaaaagtggcactatctattctaaaatacagtatgcctcctctgtgtttgaacagttgtagcgtggccttggggcctcctgttagctggcttggagaagggattcttgggattgtagagattagacctgaggaggccccttggagctctctgactaaattttattctttattattccaaactatttaagctcaccgtgtgctgactcatcataataatgagtagctctcattgtgcttgtctatttggactcatacaatgattttttttttttctttgagacagagtcttgctctgttgcctaggctggagtgcagtggcacaatctcggctcactgcagcctccacctcccaggttcaagtgattcttgtgcctcagcttctcaagtagctgagactgcaggtgcgtaccaccatgcctggctaatgtttgtatttttagtagagacggggtttcaccatgttggccaggttggtctcaaactcctgacctcaagtgatctgccttcttcagcctcccaaagtgctgggattacaggtgtgagccactgagcttggccaaagtagttttttaagatgttagtatcttttcttgcagctaaaaaagtttgtcagagatgattctactttgttctccaggtgttttctcagggagaaattggaggcagtaagccactgggggagtcctgtggctggggggtggggtagtcctgtggctccttgtcagggagtcctgtggctggcaaggagagaagtcctgtggctgggttgggagggagtcctgtggctggggtctcatcctgtgcctaacagtgtccagaggtgccgagaccagctcagtcggggagaccctaacccagcagcgctagaggaattaaagacacacacacagaaatatagaggtgtgaagtgggaaatcaggggtctcacagcctttagagctgagagccctgaacagagatttacccacatatttattaatagcaaaccagtcattagcattgtttctatagatgttaaattaactaaaagtatcccttatgggaaacgaggggatgggccgaattaaaagaagaggttgggctagttaaccgcagcaggagcatgtccttaaggcacagatcgctcatgctattgtttgtggcttaagaatgcctttaagcggttttccaccctgggtgggccaggtgttccttgccctcattcctgtcaacccacaaccttccagtgtgggcattagggccattatgaacatgttacagtgcttcagagattttgtttatggccagttttggggccagtttatggccagattttggggggcctgctcccaatacagaggtctcgtgtaaattccctgggaggcgataagcctctgagaaacagactatgctaaccacgccatgaaagagaaacttatttataaatcagatgccagttactagtttactgcttatttgcccaggcgtagctctgacagagtccccgactcatagtgcttgctcagtgcatgctgaacaatgattggaatcaagtcatggctcagagcatagttttgaataatgggaaatggatgttcttaagtaacatagtcaccaagataatgcgactagctgggtcaccccttttcaattttaggatatttttatcaagatttaaatggccatcattagagttatagcactttctcctttggattgtcctagaggcccatgagaaagtattccctaatttcttaggagaacagtttgtgggtagtatgcggtcatgtccagttaaattgcagatatttccgatcgaagatgttccagtcctgagaacttcgtgacattagcaggacttctacaagccatctcttagggtggggcatttactgcagttggctagtactcttttctccttaactttgtcatttgttgatttttttttaactgtccccaaatactgtgggcagagtgtatctagaattgaggcctccaccattgcggagaggacatggatgctgagcagtcccctgagtgaaggttataaagaagcaaatagactacacatgtctgtaaactgctcttgagtgtcccaaatttggggtacttcagttcagctgtaggaaaagcctcaaactgtttatactttgcaagaattggaaacttctaattcacgttaagttttatgtaatacatgataagcttcataggagcttcatcttttatctacttggacttttgcttccgtaggttttgttaaaggccttcatagcgaacctgaagtcaagctcccccaccattcggcggacagcggctggatcagcagtgagcatctgccagcactcaagaaggacacaatatttctatagttggctactaaatgtgctcttaggtaaggtggaggcatatgagtggaagagtctccagcatgtactcaagatagacctttgaaataaataaaaccagatgatccctcagcttctagaccaggctatttggcactggttgattgaatgtgaactgcactggggctgctgtgagcccgcatgggtctctgtgaccctgcagatgcagccgtgcccagggactgggcagtgggtgtgggctggtgtgagccctgtctgccacccagggcctggccctctgtctgtgtcggccatgactatggtgagtcttgtaggcttgagactgtgcctcgggttcctgcgggttctctgtaggtcagttgacagtttctcctgttgtttgggtaactgtggaaacgaacactggcaagtgctgaagcgagcatgtggacgtgcgatatgaaataacgacctggctttcaaaggcagtgaggctctctggaaaggaccttgctgagctagggatgtgggtgtgtagccattcccagtgggcctcatggcgtactcgttcatgatcatgtttgtgccatcttgatctctcaggatctcttcttttttaacagattaagccgggaatctccaaacagtgagtcagatgttaagatgtcttgcttccacccccacaggcttactcgttcctgtcgaggatgaacactccactctgctgattcttggcgtgctgctcaccctgaggtatttggtgcccttgctgcagcagcaggtcaaggacacaagcctgaaaggcagcttcggagtgacaaggaaagaaatggaagtctctccttctgcagagcagcttgtccaggtaggagcacagggtttactctaggccctgcatgtgaatgactgacattcaaagaaccgattaatttggaagagaagcggcagaaccgagagttagaggtgtggactctggagctgcgctgctcgtttccaaccctaggtgctgacctctagctgtcttccctctgtatgtccctgtcaccgtgagtcaaatgcgggtgatgcctcctcaggtgccgtgttacctaagcctctcagagaccactgctaccctgtttctaaaaccagaggtcacgatatgtgttcatccacccagtaaatactgattgagcacccactgtgtgctaggctctgggataggggctgggtatacaatggtgagtatttcagctgcagcttctgccccgtggaggctgtggcctagcacactggtctaggcacggtggtatatgctcactcaaggagatagggacgtggtcgtttggggtgtcggaacaaaatgtcggaacttctctttccaatgcagagaaaccttgcagtaattctaatgtactgtgattggcagttgacttcagttctttgtagcacgcttactcaggttatttcactaactatgtaaccatgcagcctcattttaagcaattggattttttgaactttacttaaaatgttatgtcagggtttttattgtgcttaatgtgtgccatttagctaagttttgtaggatacgaaattgtaagtggcttaaaatgattcttaatagaatcatgaattgaagataatgctaataatttaagcactgagttaggtagtgtttgtaaaatgcttagaatgcttcctggcacatgttaaggccatgtaagtgctgcgtgttgataaacagctgagcaaaagtggactcttaagaaagtattggggctgagagttctgttccaaccagctgccctttggttatttttcagaataaaagcagagtctcatgggatatgacatttatatttccttcacaaaaaacactgctgagtgttttgttgagtaaaaagggtgtagccatggtaataatacatttaaaatatagtttatttcatctttaccttgccttgttttttttttaagctagctttttattgagaattccacacatacaaaagtatcaactcatgaccagttatatttcatttataatcctacttctccctttttttattatttgaaagcaaaccccaattatcctcttatttcatctataagtatttcagtatctctatagatgaggactcttctttatttttaaaactttatttttaaaatgatggtcagatgcagtgttcatgcctgtaatcccagaactttgggaggccaagctgggcggatcacttgaacctgggagtttgagaccagcccgggaaacatggcgaaaccccatgtcttaaagaaaaaaatcagccaagtgtggtgatgcatgcctgtagtcccagctacttgggaggctgagatgggagggtcacatgagcctggaagatcaaggctgcagtgatccatgattgtaccactgcactccatcctgggtgatggagcaagattctgtctcaaaaaaacaaaactgcaaaacaacgtcacaaaacagtgccattgttagacctgaaaatattaaacatttcctacatcaaatacccaccaactcattatcaatttttctctctactcttttggaatcagcatctaaataaaattggtcgataaggattgtaaatctctttgatgaactggttcccctccatcccagtttttttcccttagagttcatttattgagaaaccagattgtttgtcttctaagttttcctgtggtctgatatactgcttccatctccactgtgtaaattaacacctttttctcttctctgtatttcctgtaaatcaataattggaggaaaagccttgtcagatttagtgtatattttatatctgagtccagtatttcttatataatattttaagataagtgtactcttttaaaaagtattgaaactatatgctcaattttttttaactgatgcttttaagaaggctgcttgatcataaaagtttagagatcattggtctgatgggaaaagcaaataattactaaaccgtttagcaaggttgaggtgcacatggtggggcctggagaagttcagtcatgagccgtcacttatgggcacgtggaatctgacccggcacagagttgggagaagacaggagctttatagacagaaaatgtggtctttgctaagtcccaggagtgaaagggtgagacagtgctcacagcacacgagtgtgggtgcgtagacagagcaagggtgggtcctgaaaaggcctgcaggctttctcatagattagcaagagtgctggttacggaggtttctaacatttgtgaacagatcgaaactgtgttaaattgggattgcagtaatcctggaaggacagggatagagggtgaaggggaaaaaagggtatggatgtgagacttaattgctgattttcttaagacctttctccaaagtaaataaatgatgtggcacatttttgaactggcaaattctaaactctagatatgattatctctataacatatcttactccatcttcttttgactaaaaactgttcttaattaaattaccatgagacgttcaattcagcaaatgtagtttggctaaccatatttaattagaatttaatataatcctaggcctggccaaactattaagcaagtgtgggcaaaatattgataattttagatatgcaggaacttagtttgctttccatgtgtgcttttcgaaaaaggaataaattgaaaaatagaggaagccctgaaatccaagaagcaaactctctcacctaggcatgcagtaaaagcaattctaggatgattgctgtttggcgcgtagttcgtattagaaaccattcttcttgaataaatagtatgtttaagaagctgggcagagggaaggcatatgcatatattatcaacaaggagggagaaaaaggcaattagtaaccatccataggagggtcagcaagatttataaaggaaatttgtgatccaagtatgaagcaaaataaggtgcagaataaattttaagcaagtaatagattagagtaagagaacccatttgaccattaaccttgggacattctctttcaaatgacatggagtagtactgaaatctttctttctttctgagtctaggttattgtgactggactcagaaagaaatatttcattattgcagtgaataacatttgtgaacattattgttcataaattatgcagtgaataacatttatgaacacgtgatgtgtaagatacatactgtttatttttagttaagttttttggctcaacttctaggcagagaacattaaatgtaaatagtgttacctaggagcatgtaaatggaaatctccatagtatgaaagcagtgctgttgctaacagaatttaggagggggcagatgaggtgaaggaaatgtgggtgctgatttccttattacattgagaggagccaggagattctttgttcaaaatggatggcttaagaagtcaaagtataagctgattacgtagagcaggtacccaaaaatgttttgtgtaaggggccagatagtaaatattttcagtcttgcaggccatcccaagtctgtggcagctactcaacactacctttgtagcatgaaagcagccacaggcagcccataaatgtggctctgttccggtgaaactttaggtacaaaagcaggtgcaggccagacctgacctgtgcactgtggtttgctgacctgggattcaggggtatagaagttaccatcagaagagctaaaagtgagactttttactttatactcttctacactgtctgattttgaaaaaaagaaacatgtattttataatattaaagatagggttggcaaatagcaaataaaaatacagaataccagtgaaatttgaacttcagatacattatgagtaattttatggtgtaagtatattccaaatcatgtgggacatacttacactacaaaattatttgttgtttgtttacagtttaaatttgagtgccttgtattttatctggcaactgtaattaaagggaaaaagaataaattcattatgttcatataatgtgatatagcaggggtccccaacccccaggctgcagagtggtactggtccatgggtccccaacccccaggctgcagagcggtattggtccatggcctgttaggaaccaggctgcccagcaggaagtgagcagcaggtgagctggcattcccacctgagcaccgcctcctgtcagatcagtggcagcattagattcccataggagtgcaaaccctattgtgaactgcacatgtgaggggtctaggttgtgcgctccttatgagaatctaatgcctgatgatctgaggtggaacagtctcgtcttgaaaccatcccctggccctgtggaaaaattgtctcccatgaaaccagtctctggtgccagaaaggttgggtagcactgtgatatagtattaaaagtgctaataaatatggcatactgcctttaaaatgtctggtagctctttctcagtggcactcataatagtgttttttgatttttaaatgtgtgtcaagctgactctcccctccgtgtatgctgggctttattttccctttcctagtcaccagttttgggaaatagagatcttcattctcatgctgctcctctagtgcaagtgctccatttatttttaaggaattaatataacaaaaaatcatgggaatttagaaaacaacatggaagctaatgatcacattggtggaagtgatagggaaatatttagggggagaagttaaggtataaactttgtcaatgaagtcctattaaaaacaacaaaaaagtgaagcttaggatgcattttataaactctgaccagaacacctgtgtttctctgtttctaggtttatgaactgacgttacatcatacacagcaccaagaccacaatgttgtgaccggagccctggagctgttgcagcagctcttcagaacgcctccacccgagcttctgcaaaccctgaccgcagtcgggggcattgggcagctcaccgctgctaaggaggagtctggtggccgaagccgtagtgggagtattgtggaacttataggcaagttattagcaaggtctactcttacaattaactttgcagtaatactagttacactctattgattatgggcctgccctgtgctaagcagtctgcattccatcttccttgccaaaacttataatacaaatttcatctttattttataaataggggagttgggctgggtgtggtggctcacgcctgtaatttcagcactttggaaggatcgcttcagcccaggagtttgagacaacctggccaagtgagaccctgtctctacaaaaaaaaaaaaaaaaaaaaaattagctgggcatggtggcacatgcctgtagtcccagctgctttggaggctgaggtggtaggattgcttaagcccaagaggttgaggctgcagtgaatcttgatggcagctgcactgagcctggtgacagagcaagatgctgtctcaaaataaatttaaaaataaaataagagaattaaagtttagcaggttgggtggcaaaatgaggccacacatttaaagcccctcctcctgattcttttctctgccttggctgcctcctgtggcattttaggtgctgagaaatgaaaacagtagggaaaatagttccaggatcctcatgttaatttgccagaaatggcatcttcaagtcgtcagagggatctgagagttccttcctggcctgacttgagaaaatccgtctgtccccagctctgcgtctgcctccactgcccagtcacctcctctccatgctcttggggctgggccctaccccaccatgcagtgctgccctggagcagtgagcttggtgggtcctgtctggcatgagagctgcctttgggagctggatcccagcctctaccactgggtctggtgcctagcaggctatggataaacttctgctgactccggcctctcctaagccactgcaacgtggtcggtgtagtgcacagtgtgtgtgcagcgtggccttactcacagcctccacattagagagaatctgactgaagtcttactgctgcctcgtgtgaacataaatgtttgccagaaccatgagcaggaaatgttaatctgccttgtttcctgtcctttacacggaagaatttttttctgtatggaatgcgtgccttacaaataatgagtggaaatacccatcgctaatgaaaagttatacttgactgttagtcagctaaataatctgagatttctaatacttttaatttggcttttacaatgcaatttatcttagcttttttgatttcttaggtcatatctttagaactatatatttgaatgttaatgtaattttcatattgaaattaaaatgttgaactgcgatgttaagtgtttcctgtggaaaaacgttcacattttctctagttttaaagttgaatcaagctgtttgaagattttcacatttcttctagattttatcagcttgttactttatctgtcactttctgtgatttgcagctggagggggttcctcatgcagccctgtcctttcaagaaaacaaaaaggtgattatttcagaaatcagagtcttgtgttgaatcttactgattttcttgtatttctgtaatgtaatgtatcttgtatttcttgtaatactgtattggactctgtgtatatctcttctcagatgagtgattatatgtgtgaatgttgctggaatctgataaccaggcctgaatagttttgtagggtggcttttaaaaattactttcatatcagaattgctttgtcataaattttgaacgcatcataaatttctaatgttcggggtcagcagactttttttgtaaagggacagagtgtaaacatcttagctttatgggccatatggtctcttttgcaacattcagctctgccctgtgacaggaatgcagttgtaaagacatgagctactggccagctatgttccagtagaactttacttacagaaacagacaggctgtagtttgccaatacctgccttagggaatgtgttgttatattttgtgagttaccttctcagtaaattttatttagtattagtcaggaatattattaagtagcttcttttccagcctggtcaacatagtgagacccggtctctaccaaaacaaaacaaaacaaaaaaacagccacgcatgtggcatgtgcctgtagcctcagctgctgctcagggggctgaggcaagaggattgtttgagcccaggagtttgaggtcacagtgagctgtagtcatgccactgcactccagcctaggcaacagaatgagaccttgtgtcttaaaaaaaaaaagtttcctttgttgggttattttaatttggacctggttatcatttttcagccatatttaactttgtacatatcagaatgttctgataaaacttaacttttattaaagtgtttgtgatataatctgctagttttggtacacattatcttttgcaatgccagttattttcttttccagtgtgggtttgcataggaaaagaattgctgtcactttctattttgaaatcttaaaagactgatccttttttgtgtcatgatttgagtatttaattgagagcctaatgcctaatattatttgcagtattaaatgggatcttaacaggaatagcattctagccttcattgaattaagtaaacatttcttaagagaacttggaatctataatatttgcgtcatcatagtatgagatacttaatcaagtttgagattttagtgaaacattgtttagaagccaaaaggattctaggaaaaattaatgtctatattcttgaattaggagagattttgggacgtgtgactaagttacgctgacacttgtttgtttcttagtcgctttttccagtggcggtgagaacgaagatgactgattcacattgctcagatgagtttatcctcttctggctgggacatgggatatatcctgtctcttttaagcctttttggtatttttcccccattgagagctgtgtcttcaaactcttctgttatagctggaaaatcctttttaagtgaaatctgcccaaattataagacagatgaaggtagagttgtgttggatataggattagggtgaaagtagtgggggtgtcctggagcctctcttctggtggcagcctagctcttgtgcctttgaggaaattaccctggggacggctctgtggaacatatttgcaaaccactgatttggaagatagagatggcttttgttaagatctgaattcacctttttggcattttatttgatttctcaaggtaaagaacttattttgtaataaagtttcctattatttagtagataggccaagttgctgtgttaattccatgtagattttgggtttcctttgctcattttttcactcttaatctcacatcattgtaagtttatggaagttatcatacttctgactttttctttgaagagcagaaattagaaattcccaataattattttgatagtgtcatttaatgacactcacatgtgatgtagccacaaagatttaatgagttcagttttaaatcatattaagactgttggtttcatttgttctcattaatgtaattctgaagatgaacaataaaatgtatttttagaactttcaaatgaaatattatttcatccttccagatcatataatgcttaagttctgattgttaatcataaagtctagaaaattaaaagataataaaatgaaagtgacttttaggtattagagttttattataaattctggtgtgtcattggagctatgacatgaatatttcaaaggccaatagcattggatctttacagttataacttaccatttttaagtttaagtagtaatatagattatttaataatcaaaatcaataaatattaattattaaaatgttttgtggtatagtttgagaatcattgcttttaactttttccatataggtttattgactttaatagcattctaaacataacatctctacattctttgtgtttaatactgtggaggtataaaaatacttatatatgatgataaactatattagagtaaattaaatattcttatgagtttcattttagagtgcatttacttaattttgaagtccttatttttagcaaactaaaaggaatgttggtacattatttactaggcaaagtgctcttaggagaagaagaagccttggaggatgactctgaatcgagatcggatgtcagcagctctgccttaacaggtagttctcactagttagccgctggtgtggaccttcactgtctgccttccaccccttgcccttcctgctcgtccccctgcacctggtggacagcacgactgggggcagcagtggagccaggttgcttaaatggggcatattcgggcttcttttataatacttactctgaagcttgtgtgtctgtggtgtttgcatcatatatttgttgttttccatggtttaggctgttttaaaattaggtttatggcttgagcatagggctttgtgagtaggggatggcaggtcgaaacatctcatgagttggatgggttatgctgggggttgggaaatgggatgaaaaattatgggatgaaaaattgcctatggatagtttaacttgaaagaatctgcctttgtttacagatagttatcttttttcttttttgagatagagtctcacactgtcacccagtgcagatacccagtgtcactggagtgcagtggtgtgctcttggtgcactgcagcctccgccttctgggttccagcgattctcctgcctcagcctcccaagtagctgggactacaggtgcccgccaccacgcttggctaatttttgtatttttttgtggagacgggtttttgccatgttggtcaggctggtcttgaactcctgacctcaagtgatctgcctgcctcagcctcccacagtgccgggattacaggagtgagccactgtgcccggccagttacagatacttatctaatgaaattctctgtgtactttataaaagatgaggattaactgaaggtactaataactggattatatgagggtggttttggttgtataatcctatctaaaagaatattttagctataactgaaagtaagacttaaatatttagagaggaaaatctgaataattctagtagtaattatttatttacaaaataaaaatagatttttttttgattacacaaattaaacaacaataaaacatcacagcaatccggatactataaagctcacatgcttaccgacccaactgccccaggagtgaccactgccaacagcttcatgtcgacctttttgccataatttttatatagccttttttgtttttaaatggtaatttagaaagtcaactaggaaaatgtgttacaggtttatcttccaggagaataggactggagtcgagatcttgaatgtggcttggaagaaggcaagcccaccccagagagatgagttgacagttgtttctgaccactgcttgcttagagggcctgcgtgtctgtgaccgcctagctttgcgcccctgactaggctgccccttaattacaaatgtctttatatattgctccagctaaggcttggagtagtcggttaagaacttgaacttcggtttttgcagtgaaacagcatttgagaatatcaccttctgataagccttattttataaggtgggtactgtagtgggaggcagtgtgagagatgcttgaaggatgcactgctgtcctgcatttcagcatcttcaggatgctgtgcagctgaaacatttgataacggtggaactgttcgttattttgcaagcctgtgattccctattgaatgttttctctcgccatttgacaaatgagtgtttctctgtcttcagcctcagtgaaggatgagatcagtggagagctggctgcttcttcaggggtttccactccagggtcagcaggtcatgacatcatcacagaacagccacggtcacagcacacactgcaggcggactcagtggatctggccagctgtgacttgacaagctctgccactgatggggatgaggaggatatcttgagccacagctccagccaggtcagcgccgtcccatctgaccctgccatggacctgaatgatgggacccaggcctcgtcgcccatcagcgacagctcccagaccaccaccgaagggcctgattcagctgttaccccttcagacagttctgaaattgtaagtgggcagaggggcctgacatctttttttttattttttatttgagacagagtctcactccatagtgcagtggaggccgggcacaggggctcatgcctgtaatcccagcactttgggagactgaggcaggcggatcacttgaggtcaggagttcgagaccagcctggccaacatggtgaaaccctgtctctactaaaaatacaaaaattagttgggcgtggtggcacatgtctgtagtcccagctgttagggaggctgaggcaggagaattgcttgagcctgggaggcagaggttgcaatgagccgagatcgtgacactgcactccagcccgggcaacagagcaagactccatttcaaaaaaaataaaaaaataaagtgcagtggctcgttctcagcccactgcaacttctgcctcccaggctcgagcgattctcccgcctcagcctcctgagtaggtgggattacaggtgggcaccaccacactcagctaatgtttgtattttcagtagagacagggtttcaccatgttggccaggctggtctcaaactcctgaccttagatgatccacccaccttggcctcctaaagtattgggattatagttgtgagccaccatgcccggccctgccacctgccatcttttgagttcttccctggagacctagacctgaaccctcctgcttgttctcttgttatctaatacccctattgacagcgcagcttagatcattaatggagagcttgacctcatctgataccttcactgaaggaaacaacttagtgtcttttgtgttgaacactgaggtaaaaaattggaatagttgattatatgaactctgctaaaattgagtgcattttacattttttaaggccttgttgggccctggttaaataattatttttaaaaatccttaaggagcctattataaacagatctgtggtcttaatgaaatgtgattaatactgtgcattattttaagaacttttgacttttcaaaaaacttttacaacatttcccatttgatagcggcataggtttaagcacttctcatctctaagttagtggacaaaaaaccctcatggatagtctaataatgtttgctacaagtccatgttgagttttatactccattttattttcagttttaaaaactgtggttaaatatgtgtaacataaaatttatgttcttaaccattttttgcgtatacagttcgctggtattaaatacatttaaataatgtcatggaatcattgctaccacccatctctgtaaccttttgatcatgtaacactgaagctctgttcccattgaactctattcctcctttcccgccaagtccctggcaaccacgattcttctttctgtcttctgaatttgactactttgggttctcatatactttaggagtcacacagtatttgttttacttagcataatgtccccaaagctcatgcatgttgtagcctatgttagaacttcctaatgtttcaggccaaatactattccattgtatggataggccacattttgcttttccattcctctgtccatggacacttgtattgcttcatgttttagccattgtgaatcatgctgttatgaacgtgggtgtacagatagctcctggagactctgctttccatttttttggctaaatacccagaaatggagttgcttttacattccaattttaatttaaaacattcatatcattgagtgttttacttaatagtatagtagttaacaaacttaataaaatagtattttggtaataatttgctggtagtccattgttcagtttttttaggtaaattacacaggacatttcaagtggacatgaaacatcttgtgatgtggaatcatgccccaagctgatggctaaacatatgaaataccataccctaaatttagtagatttagtctttgcaatttaggagataacctgttatattgttaggtttttgtcgaaaagctttgtcctcatatttccaacttgctgtaaaatttgtttgtgaagacaaatatttttgtatgggttttttctttttcatattaaaaagaaatgtccacattggaatttttttggagtttttagagctaatagagcttttcataatgtagtgggaatgagtgatcagtaagctcttagcagtttccatgcgtgcatttctgtgccttgaaataaatgacagatgagtacatttgtgttctgtgtgtaaaatgtgctctttcctcattgcacttccatgttggagggcttgtctcttggtgatcacacttcaaaattctcacagccccccttgaaccgtttaggtgttagacggtaccgacaaccagtatttgggcctgcagattggacagccccaggatgaagatgaggaagccacaggtattcttcctgatgaagcctcggaggccttcaggaactcttccatgggtatgtggactacaggtgatgcgctacaaagtggtttgtattcagacctggacatcttaattatatctttgcttccaagaagaagtcctttgatactgttttctgagttctgaatagctgatgaaaatgaccaattgaggaataatcatactttttcttgatctaaatcttatacttttgagttatcttagcataaatgtataattgtattttaagtggaaatttgtcacttaatcttgatttctctgtttttaaagcccttcaacaggcacatttattgaaaaacatgagtcactgcaggcagccttctgacagcagtgttgataaatttgtgttgagagatgaagctactgaaccgggtgatcaagaaaacaaggtgagggacataggcttgagacgacttggtgtttctgagcttgtgtgaggatttaaaatcgccctggctactgtctactttattgctttcccatccctgggcctttaaatttcccctttaaataccagctcttcccaggcctgttgttttctgcctttccaggtactacccacagccttgagaattgcctgagttctgcctcctttgagagtgtgccccagacaaatctattctgtactgaatgtttccttgtctgatttcttggatcattcatttgatggttgcgtatggcctgcaacgtttcttgttttggttctactgaactgttctaaaagtctctcttcatattatctttttacatgtaaatgtaactgtcttcacttttaattcctcaaggacaaggaatagcgtttcacagttcgtcccatcaatcagaattatagcctttggcatctccctatctaccaggcccacttcctcttagatttgggcttccccaggctgttgcctttccccaagtagcttctgcttgtcctgtagaagacctttcatgctttgcttctgcagcagccgttcctgaatgcctagtgtcaactgccttcttaccacgcccaccctccctgcatgctgcatttatcccctgccacagccctgtgaccctgtgtcctgctgcctctgacttgtctgtttctgcttggccatggtctctgtgaggtcaggtgtgcatatgggcacaaaccagggcatctctttatccccagcacctggcttaagtgctgctctggaactatctgttgaatgaactaatgcatgaatgtattgttgagtatgagacaaacaagtgtcattgtctcctttctagccttgccgcatcaaaggtgacattggacagtccactgatgatgactctgcacctcttgtccattgtgtccgccttttatctgcttcgtttttgctaacagggggaaaaaatggtgagtacaaaaggggatgtgcacagttgaaggaaataactaggtttcagaggtcagcttggtggcctgtttttgccttgcgtgcagcagaggaagtagaatctgaggatgagtttggttttcactagccgaggggagggaggaaatgatgggagcaggtaggttattgggtctggttttgttcatttgaaaacaatctgttgtttgaggctgaaggtggcttgggtgatttcttggcagtgctggttccggacagggatgtgagggtcagcgtgaaggccctggccctcagctgtgtgggagcagctgtggccctccacccggaatctttcttcagcaaactctataaagttcctcttgacaccacggaataccctggtatgttaaaagttcacatcttattttctcagatttaatcattattgtaaaaactatttcagtattgactattttagttttagagcagtaagtgttttgagttcatttgggatatttgacctgcgttgtagctcttcagaaaacacatgaatagtgaagttctttgtttcatgggttccctttagatgaaacccatagaggagaaaagtagaaacctcagcacgtaagagccaacatatatacacatcggatttaaacctaaagcacaaattgtgcctggtcgcagtggcgctgagtcgcactcagccaggccaggcattcacactcagggtgagtgggaaccaggactggctgaggcagcagtggacccaagtctccatcgcgcccatgcttactatggagccttctcgttctctctttttctttgggtgagagggtacacttgtgtttttgaatttatatgaggtaagtgtgtaatagggttttttctaatcttttttaagtggaatctggaattttaatcagatttattatctgacaacctagaattataatccagaaagtctgtggtattgaggacatattggcaatatgatgaatctctaattcttaaatcctgaaacttttttttttttaatcacttagggttattatagtgaagtcatttctgaatttggatcttctcttcacacctctttttctctttcctgagaattaagcttttgtttcgagttagaaagttgatagtagggaattgttccatggctgagcaatttatctccacagaggaacagtatgtctcagacatcttgaactacatcgatcatggagacccacaggttcgaggagccactgccattctctgtgggaccctcatctgctccatcctcagcaggtcccgcttccacgtgggagattggatgggcaccattagaaccctcacaggtaacggccagtttttcagctgtgttttttctagttatgcttactaaggtttaagtttagatgatgatgtttgttgcttgttcttctggttaggaaatacattttctttggcggattgcattcctttgctgcggaaaacactgaaggatgagtcttctgttacttgcaagttagcttgtacagctgtgagggtgagcataatcttctgtggaaccatttcttcacttagtggacattttatcattgctacaattaaaattggagcttaataggaaatatttccatgcactctaaagctgtaaccagtaatacccaccatgtatccatctctcagctttagaaagaaaacgttgccagtaaagttaatgcttcataaacttcagtttaagttctaattctcagaatatttgtttgaaatagacctcttcctaaaggatatatttagaaataacctatcattaagtgtaaagtctgttgaatatgctgggcacggtgactcacacctgtaatctgaccactttgggaggccaaggtggaaggattgcttgagcccaggagttcaagactatgggcaacatagttgaccctgtccctacagaaaattaaaaaaaaaaaaaaaaaaagtagctgggtatggtggtgcatacctgtagtctcagctactcgggaagctgaggtggaggggggattgcttgagccccagagatcaaggctgcagtaaggcgtggttacaccactgccctctagcctgggcaacagagtgagactgtctcaaaaataatagtaataataatcagttgaattaaaaaaaaaaaaaaaaaaaccactgtgctaggcccatagtatggtaagagttaaagtgagccttagggattatttactcaacctctgtttctgtataaagtggaataggctcaattctttaagtgatagcatgttgaacctttccataccaactggctcataagtcacaactggccagtcaacaagagtaaaaattaactggtaaaaatcaaagcaaaaaacctacaattgtcaaatttgtgggataactcccccttttaaaatgtcatgcctgacagtaatttctctctagtttccaggttttcagtcagttgtgtcttttttgagcagaaggaagcatgctaagagctcaatcttgtggctagctgggggtctttgtgtcagccatgcatgtgatggtgcccctgggtgcttggggctgcaggggaggggtacagcagtaggggcctgttctgttctctcgtgctgtggagtacatagtgacatagtggggtggtccttggtgtaggtcccttgttcctacccctgggtctgagatttatttagaagtggtgttggggctgtgcggcaggcccctctgtaactgatcaatgtttgtgaagttgctgtttgagagttgaaaccatgacataagcagaaatggaaggaagaaagaaccagttatgtgaaagggacacatttacttttaagcttgtatttactgagataaagtattcttaatcaatgttcttgagaggtgtgggaaaaatgcaacatcctggttgcagttaaacccagaacattgtgtgttgaagagtgacggttctcaaaccgtcaagacgcgggtactgagtgggactaacctgctgtcctcttgccttggaccttgtgttccagaactgtgtcatgagtctctgcagcagcagctacagtgagttaggactgcagctgatcatcgatgtgctgactctgaggaacagttcctattggctggtgaggacagagcttctggaaacccttgcagagattgacttcaggtaagtgagtcacatccattagatttcatgaactaagctcaattgaaagttctgggatcacttgatgcaaggaatgatgttatcaagtaccctgtccatcagaaatccgagtggtttaggtagatgacagtgattttctcctcccagtggctttttgctgaactttgccctatgcttggaattttattttattttattatttatttagagacaagatcttgctctgtcgcccaggcttgaatgcagtagcacaatcatagctcactgaagctttgaactctaggactcaagtggtcctcctgcctcagcctcccgattagctaggagaataggtgtgtgccgtcacactggctaatattttttgtagaaatggggtcttgctatgttgcccaggctggtctcaaactcctgggcttgattgatcctccatcttggcctcccaaagtgctgggattacaggcatgagccactgtgcctggcctagaattttaaaatataagtagaagagtagatttttttttttggtagtcctcgtcatttaagtattctggatagtgggaataaaagagcttagaatttttcatctttgtcttaaacttttaaaaaaatgtagcttatattaattctgcttgtttaaaaagaatatactcttcattatactgaacctaggtaagacagctggtttatattttgttgcaattaaaaaacgtgagctgtggttgcagtgagccaagattgtggccattgcacttcagcctggcaacagagtgagacttggcctcaaaaaaaaaaaaataacatgagctgtgttggcactttcattttctaagagtagttttggctggagaagttttctttcagtactttcttttagaagggaaattttcctttataatttagggtttgttttttttttttccaagccaccttttatagagcccttgtgggttatttcatttaatccttagaatgtttataaatctgggcttgttctcggctccacccacagatagggacgctgagcgtgcatgagtgggcagcaagatagcaggttatggagggcccagctcaccccttctgtggcttgagccaattttatagggcacttacagagtcttttgaaatagtatttattttgaagaaaaagaaaaacagtttactgagtactgtcttattgagtctggaattgtgagaggaatgccacctctatttatttaaagccattggccttttttgttgttttgagtaagtgctgcccaaggtccttccagggcacctggatgagcctgctctggagcaagctggcggtaagtgtttactgagtaactaaatgatttcattgttaaatgtgctcttttgttaggctggtgagctttttggaggcaaaagcagaaaacttacacagaggggctcatcattatacaggggtaagcggtttatttttgtgagatgctgttttaccttcaagaaggtgaaagtgaggctttccttgtggaatttctctaaatgcattcgtcatgttttagatgtttatttcacagtttatatcatgaaagttataatcttgtcatatggatttaagtctagtaatgttgagttctttctcactagctttccaaaatatcttacctaaaatttagtcaaatacaagattatgtttatttttattatccttctctctaaagcttttaaaactgcaagaacgagtgctcaataatgttgtcatccatttgcttggagatgaagaccccagggtgcgacatgttgccgcagcatcactaattaggtatttaccaatattttatctcttttccttttttggttgaagtactaaaagatacgagaatggaaagagagggaagaattcaaaggatgtagagcagtattcctgaatctgagctcatttcagccattctattcttaaactataatgaaaaaaaaatccaaaaaagtctaaaattataattaaaaaaacaacaaaatactaactgtccattgtaaaaagtaatgcactttcattgtaaaaattttggactatagagaatagtactaagaagaaaaaaaaaatcaccttcaattctgctgccacctggaggtaatcactgttaatattttgctatatactctatgagtttcttgttcaaaatcaggtcaaaattacatgcaattttgtaatctgacaatttccacttaatattttattagcattttcctgttatgaaacagtaattttagttatgggtcgttgttttgctatgcggttgggataaaattttatatactttttttggcaattacttattatacataaatgtttgtgtatagttttctttttctgagaattcctggaagttgagttaccaggcccggctttgaatttttttttttattttttttttgagacagagtcctgctctattgtccaggtgctatctcggctcactgcaacctctgtctccctggttcaagcgattctcctgcctcagcctcccgagtagctgggattacaggggcacaccaccacgcccaattaatttttgtatttttagtagagacagggtttcacgatattggccaggctggtctcgaacttctgaccccgtgatccacctgcattggcctcccaaagtgctgggattacaggcgtgagccatggcgcctggccaggctttaaatttaaaacaaatcttctaatagctttatggaggttataatttacatttcttgaaatgtactcactttgagtgtatagtaaactccaattttatcacatttctgtcaccccaaatgtatccttgtgcccatttgctgtaacctccggttcctgccccaactcctaggcagccactcatctattttctgtcccttaagatttgtgttttcgccaggcgctcatgcctgtaatcccagcactttgggaggccgaggttggtggatcacttgaggtcaggagttcgagaccagcctggccaacatggtgaaaccttgtctctactaaaaatacaaaaattagtcggatgtggtggcacacgcctgtaatcccagctactcgggaggctgaggcaggagaatcacttgaacctgggaggcggaggttgcagtgagcagagatcgcgccactgccttccaacctgggcaacagagagagactgtctcaaaacaaacaaagatttgtattttctggacattttatagtactggggtcatagtatagatggacttttgcatttggcttcttttacttaattgtgagattggttcttgttgtagcatgtatcagtagtttgttcatttttattggcgaaagtattctattatatgaataataccatattttatctatccatcagatggatattatagagttcatgttttggctaatttatgaattatggtactgtgaacatttgcctgcaagattttgtgtagacatgtcttcatttctcttgagtagatcacctagaagtggatttttaaataattttggtacttactgtgaaactgctcttcaaaaacataccattgttccttccttccttccttccttccttccttccttctttccttcctcccttcctccctcccttccctacttccctctccctttccctttcccttccccttttcccttccccttcccgcctgcctgcctgcctgccttccttccttccttccttcgtttctttctacatatacacatttttttaaatttcaatggtttttggggtacaagtggtttttggttacatggctgaattttggttacatggtgaagtctgagattttagtacacctgtcacccgagtagtgtaccttgtacccaatatgtagttttttgtccctcaccttccagccttccgccttgtgagtctccaatgtccattataccacactgtatgcccttgcgtacccacagctcagctcccacttctgagaacatatagcagaaacatgccaaagtatactcccactaccagaatgtgattgtgcctgattcttctcaccagtacaaatatttcaaaaaaagttaaatatgtatcagttttttgggcagaagttgatacttctctttatttatttattttttttgagatagggtctcattctatgatgcccaggctggagtgtggtggtgcgatctcggctcactgcagtctctgcctcccaggttcaagtgattcccacgtcagcctcccaggaagctggaattacaggcgagggccaccactgccagctaatttttgtattttttggtagagatggggtttcaccatgttggccagactggtctcaagctcctgacctcaagtgatccacctgccttggccttccaaagtgctgggattacaggcgtgagctaccacacccggctgatatttctttttaaaataacttaccttcttttgaaagtaatacatgtttaatgaacagaatttaaggaaaatataaaaaaacgaaataatctttgtaatcaaactactgaaaagaaaaccaaagttacattttggtgcatattctttttcattttcatcattgtaatttgcatttctttgattacttgtgagacactcctttcatttacttaataggtttatatgacttgcctattcagagattttgcagctttaccattttctgcaaatgatagcaacttctttttgtttgtttgtttgtggagacagagtctcgctctgtcactcaggcaggaatgcagtggtggaatcttggctcattgcaactattgcctcctgggttcaagcgattttcctgcctcagcctcccaagtagctgggattacaggagtgtgccaccatgcccggctaatttttgtatctttagtagagatggggttttgccatgttggccgggctgatcttgaactcctggcctcaagcggtccccctgtctcggcctcccaaagtgctgggattacaggcgtgagccaccgtacccagccagtagttacttcttatattctagaaaaaattctactcatgatcaagtctccatgaggaaagagactttaattgaagatcatggggcttgcagaccaatatgataaaatagttcattgtttctaaaagtattactgagtgttgatggcagatatgaacccttttgtttttgtaggaaaatgttacccgtattctccatttgaattcagtttagatttgttaggaatcgcagcttaagctttgccatctgggagtgtttgggacagttttgcagacaaaattgcaaaagtgcctaaggaatgcagctggcattcagacctgctctgtgctcagtactctgtggacagacactgttcagcacttgttgatcagaaggtttagaaagagaactttcaaagttggtttttaattaaagcatttaatagtgtaaatagaaagggattaaattttatgacagacaaaagaaagtacagcacccagctgggcgtgggggctcacgcctgtaatccagcactatggggggctgaggtgggtggatcacgaggtcaggagttcaagagttcaagaacagcctggccaaggtgatgaaaccctgtctctactaaaactacaaaaattagccgggcgcggtggcaggcgcctgtaatcccagctactcaggaggctgaggcaggagaatcacttgaacctggacggcagaggttgcagtgagccaagattgcaccattgtactccggcctgggccacagagtgacattctgtctcaaaaaaaaaaaaaaaagaaaaaaagaaagtacagcacccagttatgtccgagtgggtgcatgagagtgaccctgagattggagacaacgctgtcacgtgcttgaagaacgccacctgagaaagggggcgagaagtggtgtccgctggtaaccagaggtgttggcttagccatctgcagggaggagggtggtctatcacaggtgagtttcatctactttcttaagcaaattaaccttacttttgtgttaggcttgtcccaaagctgttttataaatgtgaccaaggacaagctgatccagtagtggccgtggcaagagatcaaagcagtgtttacctgaaacttctcatgcatgagacgcagcctccatctcatttctccgtcagcacaataaccaggtatgctgacccagtggcatcttcacattgtcgggaaaatgccctttcctgatgcctttctttaggctttaattgaaaacattttattttctagaaaaaagcttcagctcaggatgtttgagtgtaggtcagtcctttgataggatattatcattttgaggattgaccacaccacctctgtatttaagctctgccacaatcactcagctgtgacactgtaaatctcttaatagtttattacattccatgtgctgacagttgtatttttgtttgtgacacttacgtattatctgttaaaacattttcactttagttgtgttacctttaaagaggattgtattctatcatgcctgttgattttttggtgagcgggctattaaagtcagtgttatttagggttatccactagttcagtgatttgcgagattatcattcacatttattgtggagcttttgaatatcgtgtcaaatggccacatatatcccattcttatctgcttcttaggtgagtgggacacagtgctttaatgaagctataatcttcagaattctagcttgcagagaagattgcagaagtgataagacttgtgctttttaattttgtcttttaaatgttattttaaaaattggctttatatgatactctttttttctgctgagtaacagtgttttacaaaacttggactaaatgacttctaagcttaaatgatcacttgatgctttttttctgaattaggaactcagcttatcaaatatcaaagtcataattcctgaataaataacgtcttttttcatgtaaagactgctttaaaaaacacatggaaggctgggtgcggtggctcacgcctgtaatcctaacactttgggaggcccaggtgggcaggtcgcttgagctcaggggttcaagaccacccagggcaacatggcaaaacccacctctactcaaatacaaaaaattagccaggcgtggtggcgggcccctgtaatcccagctactcgggaggctgagggatgagaatcacttgagccccggaggcagaggttgcagtgagccaagattgtgccattgcactcccagcttgggctacagagtgagactctgtctcaaaaaaagacacacacacaaacaaaaaaaacatggagacatttttttggccaccttaatatttcccctcagataatttcctttgtttaaactcagaactggcattttctctcttggagaagattcaggacaaatactcctttaagataagtagaagcagtgaaagaggatttgattatcaggaatttgataagcttagaataaattgttgcttcttaatgtcatttcagaagatgaatatttattaatagatgccaactgagatatcattaaaattgattactaactactacttggaaaagtctcccagttccaaacttcagcaggcctcttgacaattcagctgtggtcaattgggtcttgcgtgatagatacaatgaccaattgtgcagcagagtgtgctgcttagctgcctattctgttagcattcatgtgttaacttaaaatcataatctccttagttttgttgagtgtctccgtggacaagacactgtgagggatacaaaatcagattggctttattcaaaccactggggtattataattcatttataatttattttattttttgccttttttccatgtgttctaaaggaattagagtttgtatataactataatgggggatagaaattgacatgtgccatgaagggaatgcaaaaaagtgccgtgggagatgagaagtggagaaaggaatttcttttttcttggaagcaggaataacttcatgaagcatgtatttcaacttaaacagatagtaggcaacgctgtaaggggagtatggctgcagcaaaagtgttcggggcagactgggaggaagggagggaataaattcagccattgttatggaataatgatcaaaatttattttcagcccgtttcacttaaaagttgagactgcttaactttttttaatctttaatcttaaacttttaaatgccatttgatctttaaaaatatatgttttaatagtgtattttaagtctctatatttttgttattagaatatatagaggctataacctactaccaagcataacagacgtcactatggaaaataacctttcaagagttattgcagcagtttctcatgaactaatcacatcaaccaccagagcactcacagtaagtctctttcttgatcggtcttactgacattgtaatagtttttggtagcttgtatggccagttagttgtatggtcatcttacggtgaggtgcttgtcttacagctcttacttatccatgaggcttgctaagaaattgtgcttctgtgaaaagaatctcagcttactccaggaatgtaaatgactatgttttttctgattattaaagtaatacacgcccaaaataaaaaaattcagccaatttaggaagacacaacaattaaaataagccaggcatggtggctcatgcctgtaatcccagcactttgggaggccaaggttgggggctcacttgaggtcaggagtcggataccagcctggccaacgtggtgaaaccccatctctactaaaaatacaaaaattagctgggcgtggtggcgggcgcctgtaatcccagctactcaggaggctgaggcaggagaatcgcttgaacctgggaggtagaggttgcagtgagctgaggtcaagccactgcactccagcctgtgcaatagagcgagactctgtctcaaaaaaaaaaaaaaaaaaagaaaagaaaaaagtaaactactgtcacctgcattggtaatgtatcagaagtttaaaatgtctagattataattaactcagtgacctggtaatatatactaagggaaaaatatttataatttacatttttacatttttatttttttaattttattattttttttttgagacagagttttgctcttgttgcccaggctggagtgcaatggcatgatctcagctcaccacaacctccacctcccgggttcaagcaattctcctgcctcagcctcctgagtagctgggattacaggcatgcaccaccatgcccggctaattttgtatttttagtagagacagggtttctccatgttggtcaggctggtctcaaactcccaacctcaggtgatccgccctcctcgaccccccaaagtgctgggattacaggtgtgagccaccatgcctggccttacatttttataataagaatttatgttgctgacattagaaaagaaccataatatccaagaatccaagaataattaaattatgtacatatgctagtatatagtgtgatgctttggagaatttttaacaatatggagatgtataatctggattgtaatattgagtgaaaaaaggcagaatacaaacctggtgggggtatagtcggatttcagttaagaaaaataatatttacatatatacatttctcacactggcagataatcaccaagataaattttgggattgtggatgatttttttcttctttatatttttcagatattctcaaattttctaaaatgagcaagtataacttttgttatcagaaaaaaataatatacaaaagtaatgttaatttgctggtgaccaggttaaacctttttatttttattttttgagatggaatctcactctgttgcccaggctagagcacagtggcatgatcttggctcactgcagcctccgcttcctgggttcaaatgattctctggccccagcctcctgagtggctggaattacaggcgtgtggcaccacacctggctaatttttgtatttttagtagaggtagggtttcaccaggttggtcaggctggtctcgaactcctgacctcgtgatccacccacctcggcctcccaaagtgctgggattacaggcgtgagctactgcgcccagccagacctttttattttatttgacaaaagaaatacttccatgttatagaagactaaatattgtttgggctgtctgcagtatggtcttcccttgatttgttcaaaatatcgtaaactttgcttatttatttttattgtggccgactgtgtcgggcactgttgtaggcttgggatggaaaaacaggattcctgcccttagggtttctgcaggctggtcagggagacgatgtggtaagctggagctcagctcctaaggatgtgcaggggcagttgagaggcggaagggtgggagatcattccagggtgtgggcagcacaggaacctctcttcattgggatataattgccattctgataacacgtgtttgaggtgtctaaagtaggaagttgtaccatggtgggacagatatcctgtggttatcatacacagatctcagttttcttctcattgtttgtactttttataaagggtaacaggagatataattcaataaacctttgtggtgtttgggtgtgattttattgtttctttcttctcagtttggatgctgtgaagctttgtgtcttctttccactgccttcccagtttgcatttggagtttaggttggcactgtgggtatgtattttcctcagtatatattaatagttgtctacaacagtatgacataaacatagttattaggatgccctttttctttctttttaagtcttttatcaatttggctttttggaaaaatatctgatggaatacttgtttctgctatattagctgtgtgagactagtgacaggagctgtgggaaatgaatgccaaatgttcttaggcattgatgggaatttcagggtgtggtcttcaagttcatttaagggaattttcatatgctggcaaaaggcttttctcattagcttgactctttccaaaattatttgctgtgaattagaagtttaggaaccttttttcacttaattgtgacctagcatacgaaatggtgatgatttaggaactactgttcttgtattaacagcttttatttaaaaatgattttcctccagtagatggccctactagcatctgggaaataatttcaagtcttctccagcattcaggaataggctttcattttgtgtatcaattactgagaatgattttggtgactcacatcacatttgagaagtaaacctgcagatttcttgtgtgtgtcagcaaatgaccaactgatatttgcttgaagtggattacattatctgctctagaatgattgctttcccaccttcctcacatacagactgagcagctacggtttctaatcataggtctggcactagacttcacttctgggcaactttggcattggagtaaaatgtattaatttaaagaaagttaaaaatccgttcaagtaaacatacagttctaatactttttacaatttaaaatatagatttaaatgataaaataaaaaagaaaatatgggtagacaccataatcctcgtttctgcatctgttcacaaggggttgatatttatgagttctattctccatatccattctatgttctcttaatgctcagtcagcacctcaggtggttggagttcaatgcttggtagtttgacttacactgtcttttctaggggattgagccctgggtagtcctgcttatttgaggttgcaatttgtctttcaataacttttactacaagatatggcgtgttaaaggataccattggggaaccaacataataatatcaggaaaactaaccacgtcagacctgccccattgtgtatcaagtacactatttttccatagtaataaagagttcaccccagccaattctcttttattttgtgcctgtttactcaatggcattaacatgcccaaatgtctgggtagctgtctcatctccagttcagcagaaccattgtcatatgccctagtaaaagcattccttcattggacacttaggccccaatactttcattcagatctactacctgatttcatttctcaaatgatttttatggagctctgatttataggaaagatgttagttgattaaaaataaaacaatttctgagctggtataaaatgtattgtgacatgccttcctcttggaattgcaagagaaaggaagactgttgtttgcttaaaaattgtctataatttgactttgcaaatgtctgcttccagagtgcctccactgagtgcctcagatgagtctaggaagagctgtaccgttgggatggccacaatgattctgaccctgctctcgtcagcttggttcccattggatctctcagcccatcaagatgctttgattttggccggaaacttgcttgcaggtactggtactgagttgaaacagggactccaggacttggattttgatttccttagggggaatgggggtggtgagcatatgaggggaaaatactataaggtcattgccagtgatggcttgtccctttagtcaaatttcagatgttacctatatgcataaacacatgcagttggcagctgttctgtgctgagtattttaaagtagcctcttcccaatatagcccctcagttaactacaagtaaactcattttgaatttcattttaatgggcaccatatgccagtactccctcgggcactgggatgttaagaaagtataatgtatggacttcattctcaagttagttttagattagagggggatacacgtaaacaaaagtgcagtggtcacacagagtggccctaatcactctccttgggcagatttatgggctggtaggaaagagcacaacacggagagggtgtagcaccttggcgatgataatggaggatgtggccagcaaggaagacggagtccattgaaattgattttgggagaagttgccaatctccatgaaagaattggggcctgtgctatttgcttcagggggctataggagagtttcgtgaaagggactaaaagatgagtattttaataagatcattcatccaacttgaacatgggctggaggagaaggtagggagactcaggagattaatgttgatgctaaggcaagataatggctttgggactgtagggaagacactgattgtaagagaatgaaggaggcagaattgccaggcctggttcaccaactgaacttcggttgtgaagacaaagaaacctgggatgacttcacatcctgggcaggtgtgtggtggtgacagtcatggaaattgggaacacagatttgtgcgggaaacatcagtttcagtttgagtttggcttatcagttgaatatcaggcacagatgtctggccaactctcaacatagggtcttaaatgacttcagttccccaagcaatttgtccttcccatgctattggggtggagaggtaatgtctgtgcccatatcacagccagtgctcccaaatctctgagaagttcatgggcctctgaagaagaagccaacccagcagccaccaagcaagaggaggtctggccagccctgggggaccgggccctggtgcccatggtggagcagctcttctctcacctgctgaaggtgattaacatttgtgcccacgtcctggatgacgtggctcctggacccgcaataaaggtaatgtcccacttgggtgctggattcatacagccttaatgactatgggtttccagactacctttgtttagtaatctgtcccttctttattctctttttgctttaaatgaacaaaattgctcagattgtgacactaaatttaacatcaaaatgtgaccatgtggatgggtgcagtggctcgtgcctgttattccagcactttgggagactgaggcaagtggatcacttgaggccaagagttcgagaccagcctgggcaacatcacgaaaccccctctctactaaaaatacaaaaaattagatgggttgggccgggcgtggtggctcaagcctgtaatcccagcactttgggaggccgaggtgggcggatcacgaggtcaagagatcaagaccatcctggctaacacagtgaaaccccgtctctactaaaaatacaaaaaaattatctgagcatggtggcgggcgcctgtagtcccagctgctcgggaggctgaggcaggagaatggcgtgaatccgggaggcggagcttgcagtgagccgagatcgtgccactgcactccagcctgggtgacagagcgagactccgtctcaaaaaaaaaattagatgggcatggtggtgcgtgcctgtaatcccagctacttgggaggctgaggcaagagagttgcttgaacctgggaggcggagtttgcagtaagccttgattgtgccgctgcactccagcctgggtgacagagtcagactctttccaaaagaagaaaaaaatgtgaccatgtgttttatagctcttttagtatcatcagtcactgttatccctaagagggaaatacctagctttagttttaggtttccagcattagccaagaaagctcagaattgatgttcctggccaagtacctcattgctgtctccttaaatcttggttaatggctactgtcctggctagcatagttatggagcatttccatggttgtagaatgttctgccaatctcagggacagttttgcttttctgtgaagcaataaaatcaacttcaaaacaaatgttaactatttgtacaatggatttaagatagaccagttcacatacttttttttttttttttttttgagatggagtttcattcttgttgcctgggctggagtgcaatggtgtgatctcagctcactgcaacttctgcctcctgggttcaaacgattcttctgcctcagcctctcgaggcagattacagctgggattacaggcatgcaccaccacacccagctaatttttttgtagttttagtagagacggggtttcaccatgttggtcaggttggtctcaaactcctgacctgaagtgatctatccgcttcggcctcccaaagtgttgggattacgggcatgagccaccacgcccagcctaagatagaccagttcacttactgtttatatctgattactctctctttgccttgtcttctacctttaaaaatctccctactaacttcccattctcctttagctgccatcagtcttctcccttctctgcaaacatctctggagagtcccagcctcagcccacagagcttcccactgctctgaggtggaccttgtttgcaaggcttctttggctctcttggcctggaccctgtctactacttcagccatccttccttaacccctgctggtggtttctgttgccacactccatagcagcgtttcccgcccagatcatgtctttacatctctgggcactgctctggtcctgcctgcctttccctctttgtatcctgcaggctgctacccccatcttgagtgtcctcttcagttggctttcagagggcctcctgggtgttcccttacccacttgccactccccagtcactgggttcagtccttcctgcccaccagcacatgctttctaggctctgtcctaggccgtcttctctctttgtagtctctgggccagtgctgttctagagagtggcagaattttctataaccatggcagtgctccatagctatgccaggcaagacagtagccactaaacacatatagctgttgagcccttgaaatgcagctagtgtgactgaagaactgaaccccgattcggtttaattttcattaaatttaaatttaaataaccttatgtgggtagtggctccagtattgggcagggcagcctgagagtcggggctgttctcctgtcttcagtgtctagatgagggacctcagaggacctgtctctggagctgcagttcaatgtagccagctgccccgtgacacttacatatagctgatttgtggatatgtcagacacggtgtgatgagctcagctttctgtcctcctccccacatctgcccctgccccatttaccccactttgtgtcttatcaagctagaaacaggtcaccacaagtcttcatttccactcaccaagtcttttgtttcccctactaaatattttgcgagaagaaagtgtgtacctttgtattcacatacatgtacatgcacatatacatgcacatatgcaggggtccccaacctctgttaaaaaccggactgcaggccgtgcgtggtggctcacgcctgtaattccagaactttgggaggccgagaccagtgcatcacaaggtcaggagatcgagaccattccggctcacacggtgaaaccccgtctctactaaaaatacaaaaaaaaattagccgggtgtggtggcgggcgcccatagtcccagctacctgggaggctgatgcaggagaacggcgtgaacctgggaggcggagcttgcagtgagccgagattgtgccattgcactccagcctgggcgacagagcgagactctgtctcaaaaacaaaacaaaacaaaaaaaaaaaaaaccaggctgcacaggaagaagtgagcaagcattaccatctgagctctatctcctctcaggccagtggtggcattagattctcataggagcgtgtatgagttcgttctcacacttctgtaaagacatacctgagacatataaagaaaagaggtttaattggctcacagttctgcaggctgtacaggcttctgtttctgggaaggcctcaggaaacttgcagtcatggcagaaggtgaaggggaagtaggcacatcttcacatggcccacaggaaaaagagagaaggagagagagagagagacagagagagagagagaaaaagaaagattgagagggagagaggagggagaaaggagagtgcctgtagggggagttgctacacaaaggagcaccagggggatggtgctcaaccattagaaactacccccatgatccaatcacctcccaccaggccccacctccgacactggagattacaattcagcatgagatttgggtggggacacagagccaaaccatatcagagcatgaaccctattgtgaactgcacatttgagggatctaggttgcatgctccttatgagaatctaatgcctgatgatgatttgaggtggaacagtttcatcccgaaaccatcccccgccaaccctggtttgtggaaaaattgtcttccacagaaccggtccctggtgccaaaaagtttggggacctctgcacatatgcatgcacctgtacatggacacataatacatgtacatatgcatactttatattctctgccacttctggtccagactgatatactatctcatttggattactgcactagccttttgttttggaaacagcattttttaaaaaatttaatttaatttttttgagatagggtgtcattctgttgcccagcttggagtgcagtgtcatgatcatagctcactgcggcctcgatctcccaggctcaagtgatccttctgcctcagccttctcagtagttgggactacaggcatacccaccatgcccagctaattttttgatttttttttttttttgagacagagtctcagcctgtcgcccaggctggagtgggttggcgcgatctcagctcactgcaacttctgcctcccaggttcaagtgattctcctgcctcagcctcccgagtagttgggattacaggcgcctgccaccacacccagctaactttttgtatttttagtagagacggggtttcaccatgttggccaggctggtctcgaacttgtgacctcgtgattagcccgcctcggcctcccaaagtgctgggattacaggcgtgagctaccgctcccagccaggaaacagcattcttgagataattcatataattcacccatttaaagtatataattcattctctttagtatgcccacagagttgtacagccatcaccagaatcagttttagaacccataaaggaactctgtactctttacccaaaacctccatgcctccagctgcaggcagccactaacctgccttctgtctctgtgactctacgtcttctggacattactgtggatgggctcatacagtcagtgagcttgtgactggtgccttctaccaagcagggttttcagtgtagcagcctctctgtttttcttttttttttaaattgtgacggaacttctgcctcccgggttcaagcgattctcctgcctcagcctcccgagtggctgggactacaggcccatgtcaccatgcctggctaattttttttttttttttttttagtagagatgggtttcaacatgttagccagggtggtctcgatctcctgacttcatgatccgcctgcctcggcctcccaaagtgctgggattacaggcgtgagccaccatgcccggctaacctttcatttactgtctgcatttcttccctgatgccttccagtccatgcacccgattgtagccattcatcctattatggtttaaggtgactgtcttagtcagcatgggttgccataacaaaataccatagcctgggtggcttcaacaacagaatttacttctcacacttctggaggttgggaagtccaagatccaggactttcgccttgccctcatgtggtgagggggtgaggaagctctgtggggcctcttatatatggatgctaatctcattcatgaggggtctgccctcatgacccagtcacctcccaaaggccccacctcctaataccatcaccctggtaattaagtttcagtgtataaatttgggggactatagacattgaaaccataacaagcacttttctaagatcagggagtgagtaagtagcagagctaggacctcaattccacatgtcagtcatcttgccttcactctgctccatgatggctgcctcctagagcattgggagtctcgatgttctatatgctctcatgtgttgtgtattggagatagttgaggctttatgaatacatctggatttgttgacttctagctttgctggtaaccagctgtgaccttgaataagttacttcatctctgagcctgtttcctcttttagaaacaggagtttaaaatgctgctttgggttgggcacggtggctcatgcctgtaattccagcactttgggaggctgagatgggaggatcactggagcttggagttcgagaccagcctgggcatcatagtgtgagatcctgtctcctcaagaaattaaaaaattagctgggtgatgtggcgtgtgcctgtggtcccatctactctggaggctgaggtgggaggattgcttgagcccaggaggttgaggctacaatgaaatatgattgcaccccatcctgggtgacgagtgagaccctgtctcaaaaaagaaaaaaaaaatgctgctttgtacccctttcatgtcatggcgtcatggccaacatagaatgccctggttgtttgctgttggagggcatgggcctgggggctccctgagggctccttccatcttcaactcattctctgtgcacctgttaggaagttgtgggccagtccctaccatgtatcattgtgtgggtaaaagtaaataaaatgtgtacagtgtctgaactgtacatatcagggtccaagaacaaaatgagtgacatgggttagctctttttaataaatggtaaaaccaaatattctaattttcagttttgttatacttccatcacatgtttttgtttttttgttttttgtttttgtttttctattttaggcagccttgccttctctaacaaaccccccttctctaagtcccatccgacgaaaggggaaggagaaagaaccaggagaacaagcatctgtaccgttgagtcccaagaaaggcagtgaggccagtgcaggtaggaaacagcgtggggaagggagggacatgagtgcagcatctgtcatgtagaaacataggatttaagtaacttggtgttttagagaaataaatataatacacatcagtaaagtgagagaaagtttctccaggtgcggttcaagatattagaaactaatgactgatgtacacagaccaccttttggtctgaagcatttctaagtgccactggctgacatgcagcccctacagcctccaggcttccagccctagcatggagcatcactctcctatgcttccctggttgcaggtgatggctggagaggcctcctgattttcagtaagggaagtggtgtagatgcttaggaatagatgtagtgagtgaaaaaactgattctgatatgtcaaaaattctgattggaaatggaatatttacatttggaagagctaaaggcgagagaaagtggggataaagtcatctgagttggaggagcttaaaccattcacaagtttggaggacctttttttacccatgaaaaggtcagaacagaaggggctaggatttaggtgtgactgcagtttattgaattcccatccatactgctctcggtgggcagtggcaggggcaggagaggagcctggcaaagcatgaagtgactgctgctgcctctgctatctgggacgcctggccacctgtctgtacagtctccctccagacccattctcacgctgtctcttggcacccaggggccagtgatggttctcccatttgttttgtgtatatagcatttatatcaaggctatttatttatttatttattttatttatttatttttttgagacagagtctcactctgtcacccaggctggagtgcagtggtgcaatctcggctcagtgcaagctctgcctcctgggttcaagcaattctcctgcctcagcctcctgagtagctgggactacaggtgtgcaccaccacacctggctaattttttgtattttttattagtggagacggggtttcaccttgttggccaggatggtcttgatctcctgacctcgtgatccgtccacctcagcctctcaaagtgctgggattacaggcatgagtcactgtacccggcctatttatttatttttaattgacaaaattgtatatatctgtaatatacaacatgatgtttgaaatatgtgtacattggccaggcgtggtggctcacacctgtaatcccagcactttgggaggctgaggtgggcggatcacgaggtcgggagttcaagaccaaactggccagcatggtgaaatcctgtctctactaaaaataccacaaaaaaaaaaaaaaaaaaaaaaagccgggcatggtggctcgcgccagtcgtcccagctacttgggaggctgaggcaggagaattgcttgaatctggcaggtggaggttgcagtgagctgagttcatgccactgcactctagcctgggcgatagagcgagactccgtctcaaaaaaaaaaaaaaaagaagaaatacatatgcattgtggaatggctaattaacctgtgcatcacctcacgtatcattgttttgtggtgagaacacttaaaatctactctttcagtgattttcttgcatatggtacattgctattaactgcagtcaccatgctatacagtagatctcttgaactcattcctcctgtctataaatgaaattttgtatccttgaccaacacattcaaggttttttttgagatggagtcttcttcacccaggctggagtaccatggcacgatctcatctcactgcaacctccgcctcccaggttcaagcaattctcctgcctcagcctcctgagtagctgggattacaggcacatgctactgcacctggctaatttttgtatttttagtagaagtggagtttcaccatgttggccaggctggtctcgaactcctgacctcaagtgatccgcctgccttggcctgccaaagtgctgggattacaggtgtgagccactgcacccggcctcaagcgttttaaaagatgctcttttctaaggattgactgtagtacaggaggaagattgacctgttgaaaagcctcagcctttacaagtgtaaaattatcagtatattactatcatctttctgatgaattaaataaactaaggactccaagtcaaaagtcttcaaactgaagtagaatagttgtatatagtgcttggcactttaatatttagtatcggtttaatgataatgtttgtgcctttgccgtctttaaaacatttttacatcatccctgtttgattacttggtgtgctcatgaagttgttggccactaaggaatcttaggctcagagaggttctggaattggccagtggtccttgaatcagctgctcctatgattctctaactgatttctcacaaagcaaacaagcaatcataacaaaacaactgtgcacactgctcttcttattttgttatttaaaaagtacttaggctctacttatgtttgttagtcaatttctcattacttctagttaatcaaaaggtcagaggaaatacttgaatattttcatactagaatactttaaaaaatcatgatttccagtaatctctttaaaacttggcaagttattttgatctaaaagtttatcttttgtgtgcatatttttaaagcttctagacaatctgatacctcaggtcctgttacaacaagtaaatcctcatcactggggagtttctatcatcttccttcatacctcaaactgcatgatgtcctgaaagctacacacgctaactacaaggtatgggcctctgcatcttttaaaaatatatatgcacacatacttacgtctaatggatagttgatgtttttcttatgatttgtaggatgtataagccctttgagatatgagttacatttagttttttcaagtttgtttgtctttcagctttgtttatgatagcttctatcatacaggtgttttggattttcatattgtttgtactcacagctaagattgattacagtgacagagctaggatgtgcagccaggttatagggggaagtggccctggtggagtctggagggatccgtgtacaggcttccttccctcccgtgaggctcacacaaaaatacagcaacatgctggtcctgcaggtaccctctgcctaacatgagccacaattccagactcacagaagaaaagcaggtgttcggcataaaccatgtgtttcaaatagtctgggcatggtgagccacttgttatcagctagggaaagtttatgtcagcgtaagaaactgttcaccagatacccccaagagccagcctttctgtctagggatgttttagttttttagttcatttttttttttaactttaaaattttctgttcatctgcaatttgttagatatgaagtatgtgtctaatttaatttttgtttttggttgtccccaataatgtttacagaagaatttttctgcactaattggcttgagttacttacattctcatagttctctagtttcagtagtttcatttattattttgttatatcaatctatctgtctgctcatctattagaagcatccttgttttttttttttcttttttagacagagtcttgctctgtccccaggttggagtgcagtggtgcaaccatgcctccctgcagtctcagggctcaagtgatcctcccacctcagctcctgagtacctgggactaccggcatgtgccaccacacccagctaatttttacattttttgtagagacagggtctccctaagttgcctgggctggtctcaagctcctggcttaagtaatcctccctccttggcctcccaaagtgctgggattacaggtgtgagcaactgcacccggctacaagtatacttcttaattattgtagcttaatggtatttatgaggggatcagttcccctgttgttctttagaattttctggatattcttctttattgattttgggatgtgaacaatagaatcaacttctacttgtagattgatttagggagaacttatacctcagatgttaagtcaccctgtccagaatgtgggatgctttcctatttgttcagaactttttaaattacctcagaagcacatgaaatttaaaggattttaaaaaaaacttaaagattatttcacatagctcttgcacatttcttgataaatgaatcctcaggtattcctctgtttttgttactaatagttacttcttatgggttttttttcccctgaaaatcatttatcaaacgtatgtggcttattttctgaaggatgtttgataattttggaagatatgaaagtcttcatattttacaaggtttgaggtctctttaagctgcatggttctcatgtcagctcccaaagcagaagacggcatgttgaaaaatgccgtagagaagatacttcttttccacctgttttcaactcatatcatcttgaatttcagggcacctttccatgctcctagtgcttgctatctgtttattattttccttcctgaataccctgaactccagcatgttctgctgtaattctggcctccctggcatcttggactcctgtttcctttgctctgtcatccccgcggtcagctcctgctgcgcagcttctcagctgaagtgcgtttggagtgcctggcgtgtcttgctggatctttgagtattgcctctggtttccttggttccttctgctgagttgctcagcgtctccactccccatttcttgtgtggcccttcctgcactcctctgattccttttgtcttccctggtttcttgctttggtttcgagtctccacagaacttttgcagctcttctgaagacctggaagctttttcatcttaattctcatctcatgacctcttttcccttctttgagagctagaacttcccatggtgaacttctctttccagaattccatgccttcttttccctcccacttacctgttgtccaggagaggtcagattgctgtgcatattggaggagaaccctttcttccctgggctcttcatctcacatgacatcaccacatcacctcgttccttggaccctcagtggtgtcactgctggatttttctttcctttggctggccttagggcacacccaggttgactagcgtagtcatggtatttagatccactcacattttcagtttctgtgtctgtctcttgcctgcttctgacttcgcccagagaaagcttctctttcacaagggttcttagatttatgttcactgagcaccttcttttctgaggcagtgttttaccaatatttattttcctagtcagtctcgccttacctttcttgttatgcatgtctttggtcctgacccattctctgagtctgtaaaatagaattgctgtataatttaattacatgaaatcctttagaatcttaacacatcttacacctgatttaatattttattgtatccaaattgaaccaaccctatgtgaatttgacagtgatttctcccagggatcctagtgtataaggaataggacttagtattttctattttttgatataccacataccagatactgattatgatggacatttaacccttttttctcattatgaaagaaagttaggaattatttcttccagtagcgccagtgtaacctgaaagcctttgaaagagtagtttttgtatagctatctgaaaggaatttctttccaaaatatttttccagtgctgacaacaaacacgcagacacaccctgcaaggtgagtgtacggcgccgcacagtggaggcatctgctgcagccgtcgatgtttgtgtctttggttgtacattatgagatcgtgacagggccagtaaccgtgtgttctctccttcaccttcccaaggtcacgctggatcttcagaacagcacggaaaagtttggagggtttctccgctcagccttggatgttctttctcagatactagagctggccacactgcaggacattgggaaggtttgtgtcttgttttttctccttgggttgtggctggcacacttgatgtgcgtcttctgggctgagttcatctaggatggagcctggttctccagggtgcctccgggagactcctccctgccccacgtgcttgcgtcacaggacccaagtctgactctgccttagccatgaagtttagggggaagtttctatttgtattctatttttgtctgttatcatgtattagcttagacccagtttagtttggaaaatcagtgggtttcaaaatgtgtttgtagagtcctttatttcttaacttgaccttttcaagtggaaaggggcaaaacagacgggtaagggggcggggcgggaggtgtgacttgctcttttgtgcctgaggaagtaacagagctggggttgacagtcatattctctgacacagatagtctctgacttatctcacagaaagtcagcggcagagcctgagttaaaagtctcgtagattttctttttcttttttttggtggctaatttcagttttatttatatttgtttatttatttattatactttaagttctgggttacatgtgcagaatgtgcagttttgttacataggtatacacgtgccatgatggtttgctgcacccatcaacccatcacctacattaggtatttctcctaatgttatccctcccccagtcccctcactccccatgggccccggtgtgtgatgttctcctccctgtgcccatgtgttctcattgttcaatttccacttgtgagtgagaacatgcggtgtttggttttctgatcttgtgatagtttgctgagaatgatggtttccagcatcatccatgtgcctgcaaaggacatgaactcatccttttttatggctgtatagtattccatggtgtatatgtgccacattttcttaatccagtctatcattgatggacattcgggttggttccaagtctttgctattgtgactagtgccacaataaacatacatgtgcatgtgtctttatcgtagaatgatttataatcctttgggtatatgcccagtaatgggattgctgggtcaaatggtatttctagttctagacctttgaggaatcgccagactgtcttccacaatagttgaactaatttacactcccaccaacagtgtaaaagtgttcctatttttccacaacctctccagcatctgttgtttcgtgactttttaacgatcgccatcctaactggcgtgagatggtatctcattgtgattttgatctgcatttctctaatgaccagtggtgatgagcattttttcgtatgtctgttggctgcataaatgtcttcttttgcgaagtgtctgttcatatcctttgtccattttttgatggggttgtttgcttttttttcgtaaatttgtttaagttctttgtagattctggatgttaatcttttgtcagatgggtagattgcaaaaattttatcccattctgtaggttgcctgttcactctgatgatagtttcttttgctatgcagaagctctttagtttaattagatcccgtttgtcaattttggcttttgttgccattgcttttggtgttttagacatgaagtctttgcctatgcctatgtcctgaatgttatggcccaggttttcttctaggatttttatggtcctaggtcttatgtttaagtctttgatccatcttgagttgatttttgtgtaaggtataaggaaggggtccagtttcagttttctgcatgtggctagccagttttcccaacaccatttattaaatagggaatcttttccccattgcttatgtgtgtcaggtttgtcaaagatcagatgattgtagatgtgtggtggtatttctgaggcctctgttctgttccattggtctatatatctgttttggtaccagtaccatgcagttttggttactgtagtgttgtagtatagtttgaagtcaggtagtgtgatgcctccagctttgttcttctagcccaggattgtcttggctatgcaggctcttttttggttccatatgaagtttaaaatagttttttccaattctgtgaagaaagtcagtgatagcttgatggggggatagcattgaatctataaattactttgggcagcaaggccattttcacgatattgattcgtcctatccatgaacatggaatgtttttctatttgtttgtgtcctctcttatttccttgagcagtggtttgtagttctccttgaagaggtccttcacatcccttgtaagttgtcttcctaggtgtttcattcccttagtagcatttgtgaatgggagttcactcatgatttggctctctgtttgtctgttattggtgtataggaatgcttgtgatttttgcacattgattttgtatcctgagactttgctgaagttgctaatcagcttaaggagattttgagctgaaccaatagggttttctaaatatacaatcatgtcatctgcaaacagggacagttttacttcctctcttcctatttgaataccctttattgctttctcttgcctgattgcgctggccagaacttccaatactatgttgaataggagtggtgagagagggcatccttgtcttgtgccggttttcgaagggaatgcttccagtttttgcccattcagtatgatattagctgtgggtttgtcataaatagctcttactatgttgagatacgttccatcgatacctagtttattgagagtttttagcatgaaaggctgttgaattttgtcaaaggccttttctgcatctgttgagataatcatatggtttttgttgttggttctgtttatgtgatggattacgtttattgatttgcgtatgttgaaccagccttgcattccagggatgaagctgacttgattgtggtggataagctttttgatgtgctgctggattcagtttgccagtattttattgaggattttcacatcgatgttcatcagggatattggcctaaaattctctttttttgttgtgtctctgccaggctttggtatcaggatgatgctggcctcataaaatgagttagggaggattctctctttttctattgattggaatagtttcagaaggaatggtaccatctcctctttgtacctctggtagaattcggctgtgaatccatcctggactttttttggttagtaggctattaactattgcctcaagtttagaacctgttatcagtctattcagagattcagcttttttctggtttagtcttgggagggtgtatgtgtccaggaatttatccatttcttctagattttctagtttatttgggtagagatgtttatagtattctctgatggtagtttgtatttctgtgggatcggtggtgatatcccctttatcgtttttattgagtctatttgattcttctctcttttcttctttattagtcttgctagcggtctacctattttattgatcttttcaaaaaaccagcacctggattcattgattttttttggagggttttttttcgtgtctctatctccttcagttctgctctgatcttagttattttttgtcttctgctagcttttgaatttgtttgctcttgcttttctagttcttttaattgtgatgttagggtgttaattttagatcttttctgctttctcttgtgggcatttagtgctataaatttccctctacacactgctttaaatgtgtcccagagattctggtatgttgtgtcttcgttctcattggtttccaagaaaatttttatttctgccttcatttcgttatttacccagtagtcattcaagagcaggttgttcagtttccatgtagttgtgtggttttgagtgagattctcaatcctgagttctaatttgattgcactgtggtctgacagacagtttgttgtgatttctgttcttttacatttgctgaggagtgttttacttccaactatgtggtcagttttagaataagtgcaatgtggtgctgagaagaatgtatgttctgttgatttggggtgcagagttctgtagatgtctattaggtccgcttggtccagtgctgagttcaagtcctggatatccttgttaattttctggctcattgatctgcctaatattgacagtggggtgttaaagtctcccactattaccgggtgggagtctctttgtaggtctctaagaacttgcttcatgaatctgggtgctcctgtattgggggcgtgtatatttaggatagttagctcttcttgttgaattgatccctttaccattatgtaatggccttctttgtctcctttgaactttgttgatttaaagtctgttttatcagagactaggattgcaatccctgctttttttttgctttccatttgcttgttagatcttcctccatccctttattttgagccaatgagtgtctttgcatgtgagatgggtctcctgaatacagcacaccaatgggtcttgactctttatccaatttgccagtctgtgtcttttaattggggcatttagcccatttacatttaaggttaatattgctatgtgtgaatttgatcctgtcattatgatcctagttggttattttgcccgttaactgatgcagtttcttcatagcgtcagtagtctttacaatttggcatgtttttgcagtggctggtactggttgttcctttccatgtttagtgcttccttcaggagctcttgtaaggcaggcctggtggtgacaaaatctctgcatttgcttgtctgtaaaggattttatttctcgttcacttatgaagcttagtttggctggatatgaaattctgggttgaaaatactttttttaaagaatgttgaatattggctcccactcttttctggcttgtaggatttctgcagagagatctgctgttagtctgatgggcttccctttgtgggtaacccgacctttctctctggctgccctttccttcatttcaatcttggtggatctgatgattatgtgtcttggggttgctcttctcgaggagtatctttgtggtgttctctgtatttcctgaatttgaatgttggtctgccttgctaggttggggaagttctcctggataatatcctgaagagtgttttctaacttggttctattctccccatcactttcaggtacaccaatcaaacgtagatttggtcttttcacatagtcccatatttcttggaggcttggttcatttcttttcactcttttttctctaatcttgtcttctcgctttatttcattaatttgatcttcaatcactgatatcctttcttctgcttgattgaatcggctgtcgaagcttgtgtatacttcacaaaattctcgttctgtggtttttagctccatcaggtcatttaagctcttctctacactggttattctagccattagtctaacatttttttcaaggtttttagcttccttgtgatgggttagaacatgctcctttagctcggagaagtttgttattaccgaccttctgaagcctacttctgtcaattcatcaaactcattctccatccagttttgttcccttgctggtgaggagttgtgatcctttggaggagaagaggtgttctggtttttggaattttcagcctttctgctatggtttctccccatcattgtggttttatctacctttggtctttgatgttggtgacctacggatggggttttggtgtgggtgtcctttttgttgatgttgatgctattcctttctgtttgttagttttccttctaacagacaggcccctcagctgcaggtctgttggagtttgctggaggtccactccaggccctgtttgcctgggcatcaccagcagaggctgcagaacagcaaatattgctgcctgatccttcctctggaaacatcgtcccagagcacgaaggtgtctgcctgtatgaggtgtttgttggcccctactgggaggtgtctcccagtcaggctacatgggggtcagggacccacttgaggcagtctgttcattatcggagcttgaatgccgtaccgggagaaccactgctctcttcagagctgtcaggcacgtatgtttaaatctggagaagctgtctgctgccttttgttcagatgtgcccttcccccagaggtggaatctagagaggcagtaggccttgctgagctgcagtgggctctgcccagttcgagcttccctgctgctttgtttacactgtgagcatagaaccacctactctagcctcagcagtggtggacacccctcccccagccaagctcctgcatcccaggtcgatttcagagtgctgcgctagcagtgagcaaggccccatgggcgtgggacccgctgagccaggcacaggagagaatctcctggtctgctggttgtgaagactgtgggaaaagtgcagtatttgggcaggagtgtactgctccttcaggtacagtcactcatggcttcctttggcttggaaagggaagtcccccgaccccttgtgcttcccaggtgaggcaacaccccgccctgcttcggcttgccctccgtgggctgcacccactgtccagcaagtcccagtgagatgaactaggtacctcagttggaaatgcagaaatcacctgtcttctgtgtcgatctcactgggagctgtagactggagctgttcctattcggccattttggaagcatcccttgttttttgaggtggagtcttgctctgtcgcccaggctgacgtgcatcggcacaatctcggcccactgcaacctttgcctcctggtttcaagcgattctcctacctcagcctccggagtagctgggattacaggcacctgccaccatgcctggctaattttttgtatttttagtggagatggggtttcaccacattggccaggctagtctcgaactcctgaccttgtgatccacccacctcagcctcctagagtgctgggatcacaggtgtcagccaccacgcccagccatattttcagatctccctctctttgccctaaaccactgtgcttaataagtagtttttagtggccagcagtctccatgtataacacattttagcaaaatggaaaatactatatgttttaaatttgaacgtgagattatactgaaataaaaatcatctaactgggattctttaaatagtaagattttcttttttgtatgtgggtttttttttaaccttattattatgactgtcatatatagaaatggctgtttttcagttacagtcagtgaatgtatcaaatgctgccttatccaaataataaaagtaaattattaataagtcacaatttaatgaagattgatgttagttgatctttatattcttgaaatcagccatatggttgtgtgtgtatgtatatatttttaaaggtacataaagataataagctcatctctgaaaatttttacatttggcataagaataactggataattaagcatcttattctctggcctgtgtctttacagttaaaggtagatttactcacctctccttttttgtttttctaagttcatcttttttgctgtttcaagacagaggcccattttagctttctcgcatatccttttgtttgtactttggaagcctcacctgcttaattgttgagtttttatccgtggtcttttagagggggatatgtagggtagaagctttcacaggttcttgtttgcacttggcccctgactgttttgaggaatctccctcactgactcacagcatggcaaggtttcagatctctttctgccacacagcagttctgaggcagctggaaagatatccagatgcttagattgtcaggccaggcttgagatatacaaactattgagccttatctgtgaccttgcttaggtgaaggcatcagagcccctgcaccaacatgcataggcctctgcatgtgtgcggggctgggtgttgaggtctgagcacaagtgtagctggagaggtgagcttgatgtggcgacgggtatgagcaggttttcttcagacttctgtgagtttacctagttccaggatttaaaggcacagagactttagaattaaaatagaatcattttctttttctaaatagcaacactaggaataaaaaataataattccacattcttgacaggtaatgttttttcttgtcttctaatccttatttattccatactcatttttatacataattgaaatgtattatgcattggatttttcttttgcattatattatagacgatttttcatgtaactccttactgttccattttatatgttttgtctggtttaagactttatctgcaaaccgggaaactgtctctacaaaaagaaaaacaaaaatagttggccgcagtggcatgcgtctgtggtcccagctactcggggctgaggtgggaggattgcttgagccttgggaggttgaggctgcaaagagccatgatcatgccattgcactccagcatgggtgacagactttatactgtctgttttgggtgatttgataatgatatgccctgatgtagtttttttatatcttgtgtttcttgtgcctgggtttattgaggttgggtctgtggcttcatagtatttttaaagtttggaaaattttaggccattctttctttctttctttcttttttttttttttgagacagtgtctcgctctgtcgcctgcgttggagtgcagtgacactatcttggctcactgcaagctctgcctcctgggttcacgccattctcctgcctcagcctcctgagtagctgggactacaggcgcctgccaccacgcctggctaattttttgtatttttagtagagacgaggtttcactgtgttagccaggatggtctcaatctcctgacctcgtgatctgcccgcctgggcctcccaaagtgctgggattacaggcgtgagccactgcacccagctaggccattatttcttcaaagattttttttctgccctgcctccctccttttttccctctcttaaaggggctgtgatttcctgaatgattgcttagtgttgtcccatagcttactgatgctcttttcagtgtttgattgttttatgtgttttctgttttgtatagtttctattattgtgttttcaagttctctgatcttttcttctacagtgtctactctgttgttaatctgttaatctgttgttaatcctgtccagcgtatttttttttttgtttttgaaacagtctcactctgttgcccaggctggagtttagtggtgcgatatcagctcactgcaacctccacctcccaggctcaagcaattcttctgcctcagcctcccgagtagctgggactataggcacgtgccaccacacctggctaatttgtgtatttttattagagatggggtttcaccatgttggccaaactggccttgaactcctgacctcaggtgattcatccgcctcggtctcccaaagtgttgggattataggcatgagccaccgtgtctggcccctgttcagtgtatatcactaattttgtttttatctctagaagtttgatttaggtcttttaaaaatgtctccctgtgtttctgtttagctttgtgaacacaattgtaataactgttttaatatccttctctgctagttctaagatcttctaataacttcccagttcttggtgtttctcattggttgattgatactcctcgttttgggttgtattttcctgcctctttgtatggctgccaattttttattggatgcccaaccttgtgaattttactttgttggatgctatatatttttgtgttcccatagatcttcttgagctttgttctgaggttagttgagttacatatagatggtttactcttttgggtcttgctttataatttgtcagatgggttggagcagtgcttagtttaggactaattttttttttggactaattattcctctttaggaataattaggtaccatgcttaggaggcaagaccatcctgagtactctacctaatgaaccagaaagtttgggttttccagtccgcctgctgagaacagtgactttctagccctgtgtgagcgctgagctctgctccttctaatcctttccaatgcttctttccctggcctcagggagttttctcacacacatatctctgctgagtactcgagagggaccttccccagatctccagagctctctctgtcttgttttctcttctctggtgctctgtcttatgaactgtggctgtcttggtctccttagattctcagcacctcttcaattcagagggttgcctgtccctcctccttgtgccacagcctaggaactctctcaaagcagcgagttggggcagccatagggctgacttagtctctcgtctcccagggatcactgtccttcattgctcatgtccagtgtcttgaggactctgggttttgtctgttttgttttttggtttgctttggttgtctcaggcaggagggtaaacccagtccctcaccctcattgtgctcagtagtggaagtctcactctattacattagatattagtatttgtagcagagccctggttccctggtacttggggagctcttgaaaggccagaaacagcatgctttctcaccttttccagggcttcagtttctggtgcacatcaagcattccatacacatttgttaaagtcctttgttagacaagtagtgattcacaggttctatttgtaattttttcagttaacatgtattgggtatctgctgggagctagtaaaaacaaaaagtggtgtgtgacaaattcaattctgacaagaacaaccttaaacacttagaatatactttgagcatatcagaattttaaaaatgtgtggcccttgagtatttgaaaccaacaagaatctattgcttattagtagaggatattttgttaaacaagtggagagagaggcattttcagtctaattggtgttggcttttagcagctgatggaaaccagttcgtgattagccaggcagtggtgaaacaggctgtgcattctgaatgcctaggtatctaggcattcagaatggtggcgctctttgagttagcatcttcttctttcttgattcttttttttttttttttgagatggactttcgctcttgttgcccaggtaacaactccagtgcaatggcgccatctcggctcactgtaacctctgcctccctggttcaagcgattctcctgcctcagcctctcaagtagctgggattacaggtgtgcgccaccacgcctggctaattttgtatttttggtagagatggggtttcactatattggtcaggctggtcttgaactcctgacctcaagtgatgcacctgcctcgatctcccaaaatgctgggattacaggcgtgagccaccactcccagccccttcttgattcttgaaaaggacattgggtgctgtacatctcgttatagatgttgataaaaatgcttgtgagaagagtaacattaaggtagttatttggtcatttttgcagattattttaagacaattctaggactgatttgtggtaaatcacacattgctgtatcatagttgtgttcactgaacatattcaggggctctacagatgcagggctcttagctgctttgcacacttctgaattcctgccctgcgaacaggactggatacctaatagacaacaggtacttgataacagtttattgaattaatgagtgaatgaacagatacataaatgcatgaaagaatggttgtaatgtatataacttggatttcaagactttttactgactgttcaaaataagaaattgaaaactttcctctgattttcctctactatttacacaatttaaatggaagttatcttgtaccttcaatttctgtctaggattcgtacaataacgggtcatctctgagtcgcttaatgtctcacttgtctttctacagtgtgttgaagagatcctaggatacctgaaatcctgctttagtcgagaaccaatgatggcaactgtttgtgttcaacaagtaagagcttcattcttttcctcttctgttaagacgttcgggtatgacagcaaaacgctgctactccttaagaggcaggcgctgttggcataatcagctgggaggattgtggggtccagcgcagcactttttggctcagtccatgattgagccaagaggccatccttcccttcactccccaggaggacgaggtctgtcactgtggagggcagaggacaccagaagctcctctgcaacctcgctagttaacttccagtccctcggagtttctgtttagaatgctcaatctcatttagaattgcaaggaaacccaaaacgcctatttaaggtacaaacagcacttcatacaatatctcatgaggtattaatagtgattcacaggaagaatttcacgctgtgagtctttgctaacatatccagttatttacagatggatttgatatttgtgtgggagattcttaaaagtgttgttcacgccacattgttgatgcctcatttttttcactgtagttgttgaagactctctttggcacaaacttggcctcccagtttgatggcttatcttccaaccccagcaagtcacaaggccgagcacagcgccttggctcctccagtgtgaggccaggcttgtaccactactgcttcatggccccgtacacccacttcacccaggccctcgctgacgccagcctgaggaacatggtgcaggcggagcaggagaacgacacctcggggtaacagttgtggcaagaatgctgtcgttggtggaagcacgaaagagcaagcaggaaatactttgtaaaagaataaaaacgaaaaatgttagcgaacatcttctaatagtctgctgtattcagagaactctaggagatatatatggttgatgcaaagatgatttaaggcatagcccggccttccaagaagtgtgtggccagtgagtgagatgggcttgggacttacacatctcagaggtgggggtagaggaggaggaacactgagtgggctgagaagcagccagctctcattgccaaagtgtgtcagcaaaccagaatgcagttcataatgtccccacccattcaaagcacaggacctgtagagtggtgtggcatgtgttggtggcacttttcaggcctgtaacaaggatgaaagaacagcttcatagcagcacagtagtgctggtgttcagaggtgtgtgaaggccatagaagcatcttggatatattaccttgtgttttgtcagctttatgactagaagtctcttttcacttaaatttgttttttttttttttgagacggagtcttgctctgtcgcccaggctggagtgcagtggtgcaatctcagctcactgcaagctctgcatcctgggttcatgccattctcctgcctcagcctcccgagtagctgggactacaggcgcctgccatcacgcctggctaacttttttttgtatttttagtagagacggggtttcaccatgttagccaggatggtctcgatctcctgacctcgtgatctgcccgtcccggcctcccaaagtgctgggattacaggcgtgagccaccgcgcccggcctcttttcacttaaatttatgtttgtgtttttaatgcctagtatacaggacttcttaaattgccttaagtatgaacaggtatttgagttgctaatctgtatagtagcaataatagaatcccttgtttttccttttataaatttagcgattaaatagctacaattaaaacactagagtcaggagtcaaggaaaatacccatgttccaggctgtatgttagtgatgtacttactatatattggagtttcaggagtaagtctgtttcaatgctttctgtaaccatttggggtattaataagcatgtgagtgtgtgcatgtttgggttaatttcatatatgtttcttagaagggatatcattgatgtaaatattttaaaggcttgtcctccaaaaaaatcatgtaatttcttctaaattactgatcttttaaatgaccttcacctttctctcaaatctcacttaagactgggctgagtagtcagtttcctgtagcagaaaaaagctcagacttgagtagccttctgcgagtgaggagacttgatggctgtcaggcagctgtaaactctaaatagagtgtcattatctgaagagggcgatgctgccacactgagtggcctttcaagttgtttctcaatctgacacgttctgatcgtgtgaatgtgaaattggtttgagcaggagtatatctgagtgcagaggagattatttaaagatattctcattctctgcttcccttttattcccatttggcagatggtttgatgtcctccagaaagtgtctacccagttgaagacaaacctcacgagtgtcacaaagaaccgtgcagataaggtaaatggtgccgtttgtggcatgtgaactcaggcgtgtcagtgctagagaggaaactggagctgagactttccaggtattttgcttgaagcttttagttgaaggcttacttatggattctttctttctttttttcttttttatagaatgctattcataatcacattcgtttgtttgaacctcttgttataaaagctttaaaacagtacacgactacaacatgtgtgcagttacagaagcaggttttagatttgctggcgcagctggttcagttacgggttaattactgtcttctggattcagatcaggtttgtcacttttatctttcatccatcatacctgttcctaatttagtacaaattaccctaaaagacactgaaatctactttaaagaaatgtggtctgcatgtttccctcatcagttgctgctgcttatctttttcatgcacctagctggtgcagaaggcctggggcatagccagcctcagcaagtcagcatccttgccccagctccctggactcaaggctaacctggggttggctgttagggatttccaaaggtttgtcccatccacttgcctcccctccaaaataagtttgaatttaaattgtgagatacaattaagatttattgtttggggaacatttttgcaaaatctagagttagtttaaacagattatcaattattaccataattgatcatctgcagtttcaagctatctaacaggttcacttacctctttaaaaaggaatggaatttagcaggacagtaactgagacccgtgctcctggagtccatgtgggagctgtgtggctctgcacaagcatttgcacgcttcccctcttgactgcattaccttcctcctatagttgctgtgggcaccagattctggctagtcctgtcccttcatgatgcacattttcctcaagattcgtcccagttaaatcactgcagatgaaactgccttttcatcgtcaaaatttaactgtcatttttgagccgtgatcttgggctactttcttatgtggggtaggaatatttgtgagttagaaatattacacttctctatttccttctagacgtaaatctgttaatcctgtcagcactgttactcacctgaaagggtctgtttccctaggagaactgagggcactcggtcaacactgattttccacagtgggtattggggtggtatctgcttgttttttttgttgttgttgtttgtttttttttgttttttttttgagatggagtctcgctctgtcacccaggctggagtgcaggggtgcgatctcggctcactgccagctccgcctcagaggttcacgccattctcctgcctcagcctcccgagtagctgggactacaggcacccaccactacgccaggctaattttttgtatttttagtagagacgaggtttcactgtgttagccaggatggtctccatctcctgacctcgtgatctgcccgcctcggcctcccaaagtgctgggatgacaggcgtgagccaccgcgcccggcctggggtctgcttttaatgaaggaggcatcaaggggtgggctttgcgttggcctgatgctttcatctttctttcacaaaacctgtccgaagaaaatccgtctaaatgggccattgctctcctcaggaaatagtcattgggaacttcttttcctttcctttgacactaggaggctgactggggagaagccctggtctatggctgtgggcagcaggggctgagaggagcaggctctcaggggggcacgggtaccccaagggaagccagagccctgatttgttccattctagtaagaacaaagactgctctggtttcatgtttgttctgattgcctttcatcaaccggtcccctttctcccagttcttaagattcagtacagtgacagttttatgaacaagaatagaacactagaacagacaaaccattgaactctatgctgataaagatttattgagctcctgctgtatgtttgcattctgcccagaggctctgagaaaaccaggccatatgctccatgctttatccatggaagctccccgtcaggttgggaaagctgacagctgcagggaatacagtgtgacacaaaactggctcccatgcagcccttacgtgtcgcctctcagatggttgggggacgaaggtcgactcctttgggtatcttattactaaaccagtttcagggaatctgtgccaccctatctgccattaacgtgaacagatgagtccccaaggtgtaattttgggtattgtctgatgtctcttggaatttattatttgtttttccaatgagatttcacctcagggtatagtaaagttgttgaggggattcctggatgtgttctgcaattatctaggctgatttcagaatagagttatgcttatagtcaaatttatcagctgtcaagaattttatttaaaatttatgcagataagcaggaggaaaagaagcctggtttttacattttaatcctattattgatgtgaaattttattttccttcctgtaggtgtttattggctttgtattgaaacagtttgaatacattgaagtgggccagttcaggtaatagcattttattattttagatttttttcttcttcttgtgtacttacatgtaatttaggttattaagtgaatgtttaaactactgttaggcatttttgctgttttctttaaatggaaatctgactaacatactgtgcatttttgcttctcttaaaaattaatgtatatctcaagacttgtttggaagtagttatgtatctgaaaattccatatgttgtcagtattcattgcacatttcaaagcatttaattgtgttgacagatggtggaatgaaatcttgtggtggagcactagtttttaaatcttcttagagaaagcagttttatataatgttgtctttagtaattattatgcatttgtattctctgcagctttttcttgctagatgttgaggttttaatacttcttgctagtccattacaggtttataattattaaaagttaaaattcttttagtacctaaaatgcttaataaacattgtaattaggaaaatttagtgcagaaggaaagtgttcccagattccctggggtctggaaacatagtgtttattctaattacatgacacctccactgtgttttggggcaagttactgtttctcttttgagtttcaatttcttcaagagcaaagaggcagaggagagctaggaagatcgtagctgctgtgcccctgtgccgtcgggtgccttctacctgctgcctccgaacctttacacatgtccctgctctgcgcgagggcacagatgggatgcactgtggcaggggtggggttagagtagatcacggacacctgttagcttgatgtgtgcttgctgtcaaggttgaatcatgaattattttatgttgcttatattgatatgtatcttaattttaaaagaaaggtctaaatggatgtttttgtttttagggaatcagaggcaatcattccaaacatctttttcttcttggtattactatcttatgaacgctatcattcaaaacagatcattggaattcctaaaatcattcagctctgtgatggcatcatggccagtggaaggaaggctgtgacacatggtaacgggacacacctttcactgtcgtcttcggtgtcgtgatgtgcttggcagtgttcgttttcatatacccactttgaacgttgtcagtggcagccatgtgcttctcaggctctgcatgtgtgtctgtgtatgtgaaggtactggttagagacgtttcaaaagagaagagagcatattctttactctcagcaatttgtaatcttctcagggaaaaaaattcaagaaacagtaagataacctaaggtacagatagattctgaatataaagttcctgttcattcacatgaaacgctaaaagttcttcacttgatcttagccaaaaggccaagaagcgatgcaacactaaaaattcttaaatcgaacttgccgtgaattaaattttgatctctcatccagtggtattggagatatagtttgacttgggttcagggctttctgttttgcctgatgattttgctggagcttaaataaggaacccaggagatggccagctgtgcaagcccccagcctgtggaaggagctagtgtggttttatgaatgagttgcaaatctttctttgagctttttgaactgatcttccagcattgccctattgacccctccctgactcctttgctggaatctgtaggcttttgaactttgacagggacacatcctaagacccttgcaaactcccagatgtgagaatggcactactacttagagtcttttcgactcagcgtgtgtgcagaagagcatcaaccgggctgtgttgcgaggcagggccttggctgacctctcagtgtttacatagctaagccagttagtgtttgccacggcctcacaagggcttcagattcacacagccaaagtatagattattaaaggcataggtgtttggtttcctggacttggagggtctttggacagaaaatcagtaggcaaccacacccagtactttgtgctgggaagcttggtcatctgtgagagggtcagagagtatacccatgcgtgcatgccaccgaagggtcagtgagtattcctgtgtgtgcatgtctcagggccggagagagtatgtgtcactgagaggtcagagtgtttgtgtgtgtgtcaaagagggttgcattgtgcccttcactgaggggtcagagggtgcctcgcgtgtgtgtgtgtgtacgtgtgtgtgtgtcactgaggggtcagagtgtgcctgtgtgtgtgcttgtgtgtgcgtacatgtcactgaggggtcagagtgtgcctctgtgtgtgtgctcatgtgtgtgcatacgtgtcactgaggggtcagagtgtgcctctgtgtgtgctcatttgtgagcgtatgtgtcactgagggggtcagagtgtgcctctgtgtgtgtgctcatgtgtgagcgtatgtgtcactgagggggtcagagtgtgcctctgtgtgtgtgctcatgtgtgagcgtatgtgtcactgaggggtcagtgttcctatgtgctcatgacattgagggtcagagtgtgcctgtgtgccaatgaaaggcatttcttatatttttttatatgtggtcatagtagaccagttaatttattttgactcctgtgttagaccaaaataagacttgggggaaagtcccttatctatctaatgacagagtgagtttacttaaaaaagcataataatccagtggctttgactaaatgtattatgtggaagtctttattgtcttttcagatgaatcaagtagattattcttgagaccaggaatgttgctgttttggttatttggaaagttttatcattttcaaattgacttttgaatttgagtcaccttttttcagaagtggtgttaaattataggagccctaggttttttttctttttttagaagtcatcacaaaatgatcagtgttcagaggaagagctttgaccttccacatggtataatgattgataaccttaattcatctcttaccataaaccaagtatgtgtaagggttttctttatttcttgaaagcattttgtagatgttgagagcagttttccaaatgtaatttccatgaaatgcctgataagggtacccttttgtccccacagccataccggctctgcagcccatagtccacgacctctttgtattaagaggaacaaataaagctgatgcaggaaaagagcttgaaacccaaaaagaggtggtggtgtcaatgttactgagactcatccagtaccatcaggtaagaggaatgtatgttggaactgtcgtggatactttattgacccgtgcagatggaaggaagtgccatgtggtaacgctcactgttaactgtgttactttgaaccaggtttgggctttctggggcctgggtagatgccggtgcagggggatggggagggaggcggggggtgggggggtgtggtggagttggggaggtgcagtggcaggaggtgttgttggtgtgtatcctttttttttttttgagatggagtctctctccgtcgcccaggctggagtgtggtggcacgatcttggctcattgcaagctccacctcccgggtttaagcaattctcctgcctccacctcccgagtagctgggattacaggcatgcaccaccatgcccagcaaatttttttttttgtatttttagtagagatggggtttcaccatgatggccaagctgtttcgaactcctgacctcaagtgatcctcctgccttggcctcccaaagtgctaggattacaggcgtgagccaccatgcccagcctggtgtttatctttaaagtgggcacagccacaggagttcacctgactcctggtctgagagtcacgagatcgttcaagatagtgaggccctcttttccaaaacgaggaccaaaaatcaattgacagtgttggtcaagatggtagaaaccttaaaatgatagaaatctcaactctgaaataaaaactttatttgtatatttatttaccactattttgacatagggctaaggtctttttctttgagctgatttctggttttgttttcttaaagtggcataagaattcaaagacattttgaggaaggctgagtgcagaaatctctctttttaaatgacttctcctttcttttaacttgcactgttgtctagccctcacttattttgtcaattctttttagctgtttgtctttgaatcttcataaagccatagcttttctcataagaagcagcactttctttgttcattcatattttaatgaacccctgtagtatttaattaaatacttaatgcctaattaaatcacataattgcaatgcaaaagtacatgtatcataaagaggtctgaaaatgagcaactggcaagcaggtggtggcaggcagagctgcttgggtgggtgggtgtcatggagaggagttcatcagccacatgttcagtgagctctggatatgtctgtttagaaatgatcactaataaacttgtgctcaaccatgtatacctctgggaagcaggtgctcttcagtagattgcctctgcagagaacacagaattgaagtgaatgtccacaaaggcaatgagccacctgcagaatagtttagtcaaggctgtgtttgaagtttgccaaagattaatatacatttgattttcatgttgtgccttttctctgattgtgaaatattacaaattctatacaaataacaatgatggcaaatcctcctgagcaaagtgtgcaccttgtatgtgccctagaggaacttgtgtttcgttctgattcccctacatttctcatgtcatagagtgggggttgcattagtgtccccctgtcctcgctgggatcacatctgtttggatcctagagtcttccagctgaactgggacaagtataacagacggacacgtaggggtggaaaggcgtctcttggcagcagactttctaattgtgcacgctcttataggtgttggagatgttcattcttgtcctgcagcagtgccacaaggagaatgaagacaagtggaagcgactgtctcgacagatagctgacatcatcctcccaatgttagccaaacagcaggtttgtccccgcagccttggcttgttgttgcatagtgatggtagcttaaggtccttgtgaaaggtgggtggctggaatcagctcttccttcagtcctaatctgtgccttgatagcagttctccgtgctagtcatgggacagctgacttcatttcttctcacaatgccatctcaggttggtattgcccacctactttacaggggggatcccacagctccgagaggttatggaggtgatcaggcagcacacagctttagagtgctggggtgagggcgggccaaggctaactctaaagcccgaacccttacctcctacactgcctcctgcattctggtcaacccagtgttttatttggtggttagatttttgtttttgttaccttactgcttgtaatttagcagttttcctttcctttcccttcctttcctttccgacagggtctcactctgtcacccaggctagagtgcagtcgtgtaatctcactgcaacaacctctgcctcccaggttcaaccaattctcccacctcagcctcctgagtagcaaggaccacaggtgtgcaccactacgcctggctagttttttgtatttttagtagagatgaggtctcgctgtgttgcccaggctggttttaaactcctgggcgcaagtgatccaccaaccttggcctgccaaagtgctggcattacaggtgtgagccacctcgcctggcctattcatcactaatcagaatttctatgatcaaatgacatgaatcattgtttccacaactgcagtggaaggaaatggcctggcagtgccagtttcagaagcagcctgcccccagtcaggcacaggccactgtgcccccagtgtagcagcacctctgtagctcacagagaagggtggtggggacctccttgaggcagctctgccagaaaatctcatgagctgcctggcacagcttgaggttgccttttaagtggactcagcaaatacatgtttgttcatcttgattatacacaataaacaactactctgtatagtacgagtagtccgtggtttttggcatttgatttaaacttagaggcatgtgatattgatgttactgccttcatgactgcacccccattctgatttcataatggaatgttatcttgagaccagttagacaacaggacagggatcttggcttctggtgagattgacagcagttttagtgtggtcagggtctccctgcctacagatggttttagaatggtgccctggaagctttatcccattcttttctgtgcgtaatctgagtagagtggagatcgaaggcctgaatacatagtaaatacctgacttaatatctgccgcaatggaaattgtgtgatacaacatttatgaaacgcttagtgcagcacctgccaggtagctcaccacaggtgcatgttgcattcagaagtagtgctagatactatcctgttactggcagtgcatacatcagtgatcaaagcagattaaagaaagaccccctgccttcttggagtgaagattttgttgggatgcgggtaaggggacagacaatagaaaagcaagtgagtgaagtctataccatggcggctgatcaggaacaccgtacagaagaatccaggagggaagagagttaggtggtgtctgcggtgggagtggcattgttcagctggtgatgagaagaagctttggtgatctggtgacatttgagtgaatttgcagaaaggaaagatacaagcctaggagatacctggggaaggaacattccaggcagagcaaatagcagtgcaaaggccctggcggggggcggacatgctgttagggtacaagcaatgagggtggaggagtggggcagccatggggagggaagggagtgaggcctggtggggtgaggccagtgtggaggagccttgagagggtttgcgctgatgtggtgtaggttttagcaggatcattcttattcctgagttgagaatagccttgagggggaggtgagggcagagcagggccacccatgtgagacccggcactggagtggaatggcccaagtcagcatcccttggcagcatgaaagcaaaaccagcaaggtttgctggtggcttagatgtggcatgtgagagagagcagggctttgggggtgatttcagggtgaggacagggtggctgtggacaaggtagggcagacattgggggcagcaggaggtcagagcctgtctggatgtagcagttgagaccccataggtgcctaatgaggtgaggccagcatcaggtgtatgagcctggagttgtcgagagactgtggggcagggggtcagcatctgagatgtccactcacagtggacccagactggctggagaggaggaggagcttgaataccgagcctgctgagtcccagctccaaggtcaggtaggtgaggggagccagtgctggggcagggggagtaggcaggtgtggggttcctaaagccaagattttttttaaggcattttgtgcaggagggcgacatctgctgtcagcaccttgggaacttggcccaggtttggcagcaccgagggcactgatgagtgcttttggaggagcaaagggagccaaaccctaatgggaatgtgttcctgaaaggacaggagagagacttgggaaaaggttttacttgaagagggaacggagaaatagggcagtagccagaggaggagaggagtcggcaatgggttaagttggcagaaatgaaggcctgtttacgcactgagggcagaagcaacagggaggatcagttcatgacacaggagacacaaatcgccgttgtggtgttcacagacatgggttaggattggctgcatggatgacagagcactgtgggttctcccagagttgctggggaggaggcagagttggtgagcacaggcgagggtccaggatgcaggaatcctggagctcaagtcagttgttcccttgttgtaagatgtggccagtgttgtgagcttcacatctgtgccttgaaaaacaccacatctgtttgcagagttgtttactatgtatacacactcagtagaaacaaaaattggaaacagtcagtgcccaccatcaataagtaatggttgaacacactgtggtataagcttagactattttagcttgggctattttgcatgattaaaaatgttctggccaggtgtggtggctcatgcctgtaatcccagcactttgggaggccaaggcaggcagattgcttgagctcaggagtttgagaccagcctgggcaacatggtgaaaccctgtctctactagaaatacaaaaagtagctgggtgtggtggtgtgcgcctgtagtcctggctaactcaggaggctgaggtgggaggatcacttgagcccattcgtgcgccactgcactcctggggcacagagtgagactctgttagaaagagagagagagaaagaagagagagggagggaggaaggaaggaaggaaataaatggaagaaatggaagggaggaaggggagggaggaaggaagaaaggaagttcagccagttgccttgggagttctccattgcactgggttaagtgagaagagcagagacgtttatgatttttcaaaacaactaaaacaaaacctctgtgggtgagggggcaaggatatggctataggaacatggggcagattaagaaagggatatacacacaccacttagcatttgttacaactgttgtgggagggatggagtgcagaaaaagaaaaaaaaaagtgcacaccatcccatgtatgtgtatacaaagggacgcttggaagactggtccccaaaatgttggtaatgattgtgtcagggtgctgcagtgctagttgattttttttcacacttttgtatatttgagtcttttacagaaagcatttattatttatgtaataaaaatctaaatgacaagatttctgttatgggaaaaatgtagctatacagtgttgttgtaaaaatgtttgcttggttcaccactgaacttaaaatgcttttaaatgagggaaggtgacgatgagatgattatgatgatttgcccttgagttacatagctggtgtacaggaagctgtcgtttcttttggcttacgtagaaatgtttgtggtgtctaattccacagatgcacattgactctcatgaagcccttggagtgttaaatacattatttgagattttggccccttcctccctccgtccggtagacatgcttttacggagtatgttcgtcactccaaacacaatggtgagtctctcgcctggctcagcagatgaatctggacggcttgttcaggctctgattactgggaccacccccagaatgtctgagtcagtcagtttgggtagggcttcttgagagtttgcttttttttttttttttttttttggtgtgggggtggtgcggaacagagtctcactctgtcgcccaggctggagtacagtgtcatgatctcggctcactgcaagctctgccttccagcttcacaccattctcctgcctcagcctcccgagttgctgggactacaagcgcccaccaccacgcccggctaatttttttgtatttttagtagagatggggtttcaccgtgttagccaggatggtcttgatctcctgacctcgtgacccgcccatctcagcctcccaaagtgctgggattacaggcgtgagccaccgcacccggcctttttattttttttggagatggagccttgctctgtcacccaggctggagtacagtggcgctacctcgactcactgcaacctccgcctcccgggttcaagcaattttcctgcctcagcctcccgagtagctgggactacaggtgcgtgccactgtgcccggctaattttttgtatttttagtagagacggggtttcactgtgttagccaggatggtcgcgatctcctgaccttgtgatccgcccgcctcggcctcccaaagtgttgggattacaggtggctctcgcaccaagccaagagtttgcatttttagcaaattcccaggtgaaactaatgcctgcttttctgggagcacactttgggactcagtgatagagaggtttattggtaggatagtaaaataggagttattttctttcacaaaattggcaattgggggaaatttaatcttccttttttcttcagctgtgacttatgtattatgtttattttaggcgtccgtgagcactgttcaactgtggatatcgggaattctggccattttgagggttctgatttcccagtcaactgaagatattgttctttctcgtattcaggagctctccttctctccgtatttaatctcctgtacagtaattaataggttaagagatggggacagtacttcaacgctagaagaacacagtgaagggaaacaaataaagaatttgccagaagaaacattttcaaggtatgctttctatctgagcctataactaacccatgccttttgggaagtcacgtgatgtttcacagtcagtaagtctggaataatacctggtcttgcttcacttctgagttgggtaaagaagtctgtatcagtgtaattttctaatccgtcctgcattatctatggctcttggttcatacctgtcttgaagttctgtcatgttctgtctcttgtcctcagtagagatgctacagcagtggctcgcctcaggcagggcagggcagtggggtggctgtcctgggggcaggcagtaggggcacgctgacgtcagggaagttgaaacccaagagaagccagtaaaagtgagtctcagattgtcaccatgtgctggcagttttacacgctgtcagtaataaaagtcttctccctgcagggcagcctgcctccaataaatacgtgtagtatcaaatcctgtcttccctcataaattgtttggaagctccccaaggacagtgatgaggcactcgtaagtgcttgctgcctagatgggtccctctccacctttgctagattctgagcattcactgagttagagctgcttctgcaaatgtgctgcttctgctaagtggctgtgacttcatgcagccttcacttggtttgtcatcagtggagatgccctgtgttgtcgaaggagataagcccagtaagcctgctgggcaccttttggtttgcaggttcagcaggcagcccatggctttccctgtgtcgcattgaagcagctggctaaaattgatgatacattaaattcctgtgacagatgatcagcttgtatttgtgtaatggtgtacagttcacaaagcttaaaaaaatgctacctgccatttcatcctcagtgaggaaggtgatacacagagagaccaagtgactgtgtccacggcgacggcgctctgcatttcactttagcggttaatgtactctacctatatttttactttatatttaccatatatcttttcatgtatacttggcgtaagtgctttatagtagtcacctaattcactgtcatcttttttgtttcttggaaggtttctattacaactggttggtattcttttagaagacattgttacaaaacagctgaaggtggaaatgagtgagcagcaacatactttctattgccaggaactaggcacactgctaatgtgtctgatccacatcttcaagtctggtaggtgaatcacattagtcttcctggagtgtctcgttccccattctgcactatacactctcagagtgtaggagctgtgctgcccggtagaaactctgccttgcccagtgtgccagttgaaaatatttgttgctgtaagagtacacctgataccatgtgacccagcagttccactcttgggtatatacccaaaagaatggaaagcagggtggtgaaaagatatttgcatgccagcattcatagcagcattattcacgatagctaaaatgtggaaccaactgaagtgtccctcgatggatgaatggataagcaaaatctggtgtatatttacagtggaatattattcagccttaaaaaaaggacattctgacacatgctacaacatgggtgacccttaaggacattatgctaaatgaaataagccagtcacaaaaggacaaatactatgtgattccacttacatgagggacctggagtagttaattcatagatatagaaagtagaatggtggttgccaggggctgcaggggaggggagttatttttacaagatgaagagagttattctagaaatgaatggtggtgatggttgtataacattatgaatgtacttaatgctactgaactgtacagttaaaaatagttaagaggaccaggtgtcatggctcatgcctgaaatccaagcactttgagaggccaaggcaggaggattgcttgagccaaggagtttgagaccagcctcagcaacatggtaggaccccatctgtacaaacaaactagccggggatagtggtgtgcatgtggtcccagctactcaggagactgaggctggaggatcgcttgagcccaggaggttaagtctctagtgagatgtgttcatgccactgcactccagcctcggctatagagtaagaccctgcctcaaaaaaacaaaacaaaacaagacaagagccaaaaatggttaagatgggccaatcacagtggcttatgcctgtaatcccaacactttgggaggtcaaggtaaaaggatcacttgaagccaggagcttgggaccagcctgagcaacatatcgagacccctatctctacaaagaaaatcaaaaactagctagatatggtgggcacatgcctgtagtcccagctacttgggaggctgaggtgggaggatctcttgagctcaggagttcgaggctgcagggagctattattgcactccagcctgggctacagaatgataccctgcctcttattaaaaaaaaatccaaaaaaaaaaaaaagtaaacctgagagcttcctcctcctgtgttaaatttggaggccaagatgtttttgttacttttacaaatgatcaaggacggtgaaggttgggcatggtagctcacacctgaaatcccagcactttgggaggctgaggcggggtgatcgcttgagcttgagaccagcctggacaacatagcaagagaccccatctccacaaaaataaaaaaataaaaaaaaatagccaggagtagtggcatgagcctgagcccaggaggtcaagctgtagtgagccatgatcatgccactgcactccagcctgggcgagatcgagaccatgtctctagagaaagaaaatgacaaggacagtgaacccaagaaagtcataagatgccagctgtgcagcaagcatggaaagcagccagtccaaattaggacagtgtgttttccaagaagaacgatcgtttgtaatgagaatgctttgctttaaataaatgactaaatagctagaagcctagttctaggggataggcacgtctttcttctctcaagaaaatagaaaggcaattctaatttctagtaacagcaaacagcattaagtcatggtccaaatatgaggcaaaccaaaatgtggcttgattgttcagcagttgatctgttggaagcccttgatattaaaaaggttctcctttaagcggcttaggagtcacgatcaaagacctatagaaagagatgccatccttctaggatccttggctctcttgggaactagattcagatagtcataatgtaaatactgcttgagctttctttctttctttctttctttctttttttttttgagacagagtttcactcttgttgcccatcctggagtgcaatggtgccatctcggctcaccgcaacctctgcctcccaggttcaagcaattctcctgcctcagcctcccgagtagctgggattacgggcatgcaccaccacgcctggctaattttttgtatttttagtagagacagggtttctccatgttgaggctggtctcgaactcctgacctcaggtgatccacccgcctcggcctcccaaagtgctgggattacaggtgtgagccaccgcacccggcccgagctttcatttttgaaatcaatgtatgactgaaacactgaagacttactgacttaattatggtttcagaacagaatgaaaatgtcttcggttctgatgaatataaaaggaaaactaaccaagttaatttggcaagtagatggtagagatagaggtggggagtggaaggggaactaaaatcttcacctagcattgttgggattatatggttacatcatctgaagttgacagaccaaaatatagaggcttcagaggtctccaaatagaactaaacatgtaattcagattgttaggaggtagtataaatgagctaaatctcatctttattacggtagagttaatgggtgatgtctaaagttgtctgaagtctataaatcatgacaaattatgatgtggtgattgtattcaacagtctttcagttgcagggataaaaccccagtttaaactagagtaagagaaagaatgtgttggtttaagctcctggaaagtgcaggcaagggtagttggtaggactgcatctagtgttgtaattctgtggtctgcattgtatatttatgcatctcagctctgctttcttcttttcatttatataatttttaaattttattttaaagatagggtctcactttgtcgcctaggctgaagtgcagtggcatgaagtgcagtgcgaggctcactctagcctcgaactcctgggctctagagttcttcctgcctcagccttctaagtagctgagacaataggcatgtaccaacatgcctggataggttttaaaatttttttgtagaaatggaagtcttgctgtgttgcccaggcgggtctttaactcttagcttcaggcgatcctcctgcctctgcctcccaaaatgctgaggttataggtgtcacccaccacgcccagtctcatctctgcttcctgtgttagttttgttctctggtgggctgttttcacatgaccgaagatgacctctagcaggctgtgttctcagcccctcaagtaggcctatgtgattggccttgcatgagtaatatgggtgaccataaacccctgaatgctctggtccacatgggccaaatgggagactggacagcattccattgatgaggaggtggggctggtctccgggagtaagggagaggagcacatgcagtaactgatggtctgctgcaagggatagcagcacagcagttagaattttggaggtaactaccagaactgaaaacagaaatgataacaagtagttgccttaaaaagggatgggagcagggtgcttttgtgatcaaagctcctttctcttactggatttttgtacacattttgcatacatatcttagagtaaaagatagcattttcagccttggtccatttgaggatactcttggcgtggcccgcctccatgctagcaggctctggttgtgccaagttcagttgagcatcctggctcttgcctgcacggaacttccagtcagtgcgtcagtatcacaagtcttgatatttcctatgaagaagaacagtagtgcagtgacagacgaaatgggtgggcaggcagaggcaggatttctgagggagagaagtagctagctttttgcagagaagagttccggcacccaagagagcagctgagagtacaggcaggcaggcaggatgccggtagggcccggccgcacggcgccacagaatcctggagaaaggggcctcttcatggcctctgcattcagctgctgtcaccctccgcacaggccatggccaaaatttaattttcatagtggactctagtttttgagccttacttgctattattgaaataattttcttgtttctttttaaagatcttcggattatgcttcactgaccactgtaataagtttaaagttgagaaaatatggcttgttaatgaatgataggtcaattttagtatgttggtcattttaatattttgccaccagttggtttggatttgatgccaggaggagacagcctcatttctaaggactagtcttgcctttgtgggataagggtggtgtgttctgtgtccttctacatgtccgagcgatctctgtgcagctcaaatgtggtcactgtcttattgcgctgatttcctctccttccatctcacaattgaggcaaaatattgttactgttgaagtgttgtccaataggacttccagcagagacaggatgtctgcactgtctaatttagttgcctttagccacatgtggtgttctgtacctgaaatgtggctggtctgattggatagcttaatttataattttatttaattttaattaacttaaatttaaacagctctgtgtggatagtggctcctgtatgagacagtgcaggtctgttgagaagcagctttactggtgggagtggagggcttggagagggcacgtgggtttcctgctggtatcttttgaccttatttaatctgcccaacatttgcaagtaagttgtgtgtgtgtgtatatataaatgtgtgtttctgtcttcttgtttcctttgactgcatttatttgaaagacactaggtggcagaattactgtatttgattggtttcaagataagagttgaaataattcatctcgtgtttttatataagtaaggtgtgtttagcatgtaaaattggtaatatgtattcacgtactgcttaaacaaaggctatgaattccacccataaaccgaaaatgaagacctttaaatttgtccatttcaggcgtgggtacttcttaaataatacctggttcaggaactagtcagaatggcacccttgactttttgtttcctgcttttcctcttgttgggagaggagggtattcatcccaaagtggtttgcctatttcacattccatctaggataagcagaatagccaagaaagatagctgtcctcctgtttacaacatttggggtaaccagcatccctctcttttggtccaagatagactggtttagaaacagatgatggcaccagaggcccaggaggtggaaacatcagctttgtttgttgtccatgtggctgaattagagctgtctggccttgtagcctcaacacggccttccagctttgctcaccgtgattttcaaggacacatcttgtgctcttccctgcctgccatccagactatacccagtcagggtggcaggagctgctgccccttcctccctgagtcctggtcgtgggtggtggagatgtgccatgacgctcacggaggcatgctcaccccttcctctgtggcagaggggatggctgcacgacagctcttccctgtcctttccaaagcgtctgtggttccactttttggggcaaagcaggaatactggaagagagagaaagtggtcctttctatagtaataaagttgacattgattcaagttcatgcttggggaaaggacagggctactaacaattataatgctgggagcaatggaattttctcatgggtatgtggtaggtttaattttaattatcccagttaattcttagaactgctctgtgaagtatttcccgctttgtgcttaagttctaaaagatcctgtgccaaaaccaagaatgaaaacccaagcattctttcttgcccatcgatctttctctcatcaggccacttcttgggttgatagtggtgagtgtagccgctgccactttcagaatacccaccatgggccccagtcactgtgtggcgtggagaagagatggttctctctgtgtcatagctgaacaagcccagcccagagaggtttctgccctaggagctctcgatggtggaattgggatgcgatcccacatcctgcctgttttgaaaacagcattctttatttccaattcctgcttccattgttccttttaatatttctttgtttagctcacaaaaacacggcttgcggagctgctgcgtgcagctgtagctgtttctctgggtgcagcctgcatccgccttcctgcccgcctcctttcctgcactgccatcgtggtctccgggcacttggtccctttctcttcccctgagtccctttggctcccctgtgccacccttgtgatccacaggctctgccttctttctgtctcagactgctgctcatcactactcgggaccctaggaagggaggttccaccgagaagcatcttctcatctcagccacgttctcagtgccactgttgtctttgttaggtaatggtagctactgtaacaaataaaccaacatttccatggcttcacaccagagaaggttgtttcttggttttatgacaatgtattgagggtgttcttggttcacggatggttttcctccatgtgggaattcggggacccaggctcctttccttcttttggttctgttctccaggccttcacatcctctgtgtctggttggggacaaggagagggaaggtaaagaaggctttgtggccttggataagtgacaggcatgcctttgctggtgttctctcgtggtgacaggtcacagccccaccctgtaaaaggggactgagagacgtcgtcctgctgcttcccagcagcagcactgtggtctctgatgtgttttctgtgaggataaaaacaggtgattccaggatgaggaaagtcagggaaacccttggaaggaggggaccaggcgggtgtcaccatgggattagtggtggcttcagaatgagctgcagcgagtgccatgccttctaaagcttttgctattctgatatgcccacaccatgcccagcaggtgtctgccttgctctccgcagagagagtgatgaatccttctcatgagcctctgtccagttgttcctccctccacctggaagggaccctgggttcctcataacatcccagcggaacaggggaccttctatcctgtccccaagttcatcctcatcctcctgccggcttcctggcccctcttatgtctgcttcctgacgccacatccttctggattctctggaattgaattttgcctttgatgcttatttaaaaatatccattgcaggccaggtgtggtggctcacacctgtaatcctgtgcactttgggaagccaaggtgggcagattgcttgagcccaggagtttgagattagcctgagcaacatgttgaaatcctgtttctatagaaaatacaaaaattagctgggcatggtggcgcacacctatactcccagctactcaggaacctgagacaggaggatcaattgagccccggaggccaaagctacagtgggctgtgatcgtgccactgtactccagtctggtcaaacagagtgagaccctgtctgaaaaaaaaaaaaaaatccattgcatacttcaccgtagcgaaacatgtatgtcttacctttcctttcctgcctgtagctgctcttttacacttaacagccacactaagccagccttaaatgaaaaacaaaccagcacttcctgtgccctcctgcttccttcatgaggggtccctccctctgtgtacactccattctcattgcccatggtggtttgtttccctcttgtttctcaagccatggcagcctgcctcttgccctctttactaaaaaggcctttgcagaggctgcctgtgttctttctttctaggtctctctcatcctaggccctccagcttgattctgtggagctgccctcttgtcactcagtagcttgtggggtcttctctgtctagccacttaattgattgtgttcctcgagttgctgtccatggtctctcgttactgttttctctgtgtttctgcctctctccttggccttggtaggtccatcccctttgtgaccttggctgttgctctcatggacaactttctcttgctggtccttgtagtcctggcatccagcttctcgacacgggacttgtcctgccagtacctcagacttgcacttaaaattgaactagcaccactgtcactctccagggcctcttcttgttaattagatcattagggatgttcagaatcccagcatcatagtatgttcctcctcccgctaccccaggaaccctaaccttacctcctcctctctatctactaggaggtggccctcagagtccgtctcatcttccacctgaacttccctaataggctccagcagctgccaccccgggggctgagtacttcctccatgccttgtgcagtgctgagccctttacctgggttctcctgtttgctccttattacagccctgcgaacagatactgctcttaattccatcttacacctaaggaagctgaggccccaggtaaggtgcatccaaggtcacccaggtagtagacagtagagccacgatctgaaccaggcagtctgattcagagcctgtgttgacactcagccacctagaacacagcttggattgtgggtttctattacctgttcaaaacccctacatcccgggtctgtccctgcacgtgctctgtggcctggctgcatcttccttgaaggcagtgcatgcctcttcactcagggggcccatgcaggaacagagggccccacagaaggatgaggccagtgcagaatgggctggaggggacaatgctgaccaggaagcaagtgtagagaaatcccaggaaacctggaggagccagagacaaggcattagaactcctcgtcgtgacctggtctgcattctctgagtgtgctgcttctgttagctcgcttccttggtctcaggttatagtttaaggcattgtggagccctaaaaagcctgtactctgtttttacctgttttaggaccctttcactttggggatgtgttgattttttttttttttttttttttttttttgagatagagtctcgctccattgcccaggctagagtgcagtggcacgatcttggccactgctgcccctgcctcctgggttcaagcaattcttgtgctcccgcctcccaaatacctgggattacaggcacccgccaccacactcggccaatttttgtatttttagtggagacagggttttaccatgttggtcaggctggtctcgaactcctgacctcaagtgatctgcccaccttggcctcccaaagtgctgtgattataggcgtgagccaccacacccggcctgaaatttaaatcagaaataaaattttgatcccaacagtgatgccaggcagcccagatctgggggagagggtggccttggccagctgggcctttctctgtttcccaagtcttgctgcctctccctgctgggctttgcagcctgtgcatgtctctgtgcctttgaccttgtttatccaaaggagaggatagaatgaagtcatgattcctggagccctgagaaggatgctgtggagaaatttgccggtagaatctagctgagtgtgttgctgaggtgccagcattgtgtgtggggaggctgaccgcttggcctgcctaggcccaggatgctccatggccgggcacagaggccacttggctgtcaggtgtcaggagcctgcagagggcacacagagcctggaccgcaggggggtcctgctttctcacctggcctccttcagcatttctgtccctcagtccttagcaagcccaggagctgttgagtttggcaggtgccgagtgctgttcctgcctgtgtagctgtggctcagtcctgtgggggccccgctgtggcccgagtgcagtgattcgaggcgctgagtgttccctgactccttctccaggagctgtgttcagactttcgcagctcttggcttggagctcctggagggcttggcattgccgaccaatgtggaggtcgacagtgagagaggaggaatgctagctttcttgaccagtccattaaataagtgggatattggccaggcacggcggctcacgccttaatcccagcactttgggaggctgaggcgggtggatcacgagctcaggagttcaagaccagcctggccaacatggtgaaaccccctctatactaaaaatacaaatattagctgggcgtggtggcaggcgcctgtaatcctagctacttgggaggctgaggcaggagaacagcttgaaaccggaaggtggagtttgcagtgagccaagattgcgccactgcactccaacctgggcaacaagagcaaaactctatctcaaaaaaaaaaaaaaaagtaggatatctgtttctgcttagaaaaatcagaattttctaaatgccaggtgttctgaatacgtaagtatgggagacgactcagcctgtttcatttttatgtaaaatcttcgcgtagccatgtggcactggaccgagatgaaagcaaagacatttctccttaactttgtttctaggaatgttccggagaatcacagcagctgccactaggctgttccgcagtgatggctgtggcggcagtttctacaccctggacagcttgaacttgcgggctcgttccatgatcaccacccacccggccctggtgctgctctggtgtcagatactgctgcttgtcaaccacaccgactaccgctggtgggcagaagtgcagcagaccccgaagtaggttcataatgccccacagcccagggcgccagcccagcaccctgtcctgagactcccagtaacctgagctttggccaccgttaaagcattttcattttccattttttgtgagggcttgtgaaatttctgctgcatattaatattcctttcatggacagcatattattgggacaaacatgcggtccagctaaaggcattcaaaatagcagttgctttctaaatgcgattttctttggcaggttctttgacaccattgcatcttgtgggatatgcttgtcatgctctgtggctcctactaagttctagtccttaaattggttccatagccagacatgttgcaatgtcttaacctcattataaagtaaatgtggttctggttatccttagataatgaagtaacagtgtagcaaatttcaaaacctcttggaaatgttattttaccattcaaaaaggcttactaaggttctcgttatgggtggccctctttttgcaaaaggttttcaggcttaagctccatttctaggtgctccaacactccattatttgtatatgtatggaaataaaagctgtgaccacccccaaccctggcccccgcccagctgaatcctcagcacagtatttctggaaggctcaagatcccacgctggggaaaagaagttctggagacaaaagagggcaggtgctgccgtgcctctctgctcagtatggatactggaccttgtgctgccagggctcccagtagggccagttcatggcactcagctggaaagtccactgttgggaggcattcttaaccatccactctgtgccgtatgtagtggggtctggtcattctgttggaggagacagaccagtgacgacatttgaaatgcttggtggatgtcttaggcctgttacgatgactgagcactgtgggggcaggagacagaaagtcagtgtctcctagttctgtgctgctttaacgtgcatagaaatcagctgcggattcagcagatcactccttttctgacagatgggcctgcttactctgatgttatatcagaaagctctgaatctgggaattgtgtcccctgaattggagtaacagaaatgcttagatgatgagtgtttaaaagaaataaaccaaaggtaaatttagtttggaattcagcaagcgtcttcattcagccctctgagggcaaactacagctttttgtaaatgtaggtaaattctgtgactgtttcgtgaccccctctgatccagttttcctttataaccttctgtattgttccttctattatcctgaaataacattaatagattaggctgggcgtggtggctcatgcctataatcccagcaccttgggaagccaaggcgggcagatcacctgaggccaggacttcgagaccagcctggccaacatgatgaaatgctgtctctactgaaaataacaaaaattagccgagcatggtgacaggtgcctgtagtccctgctactcagaaggctgaggcgggagaatcgcttgaacctaggaggaaaaggttgcagtgagctgagatcgcgccactgcactctagcctgggtgacagagtgagactccatctcaaaaaaaaaaaaaaaaaaaaaaaattaatggatcaatggatttttaacctaataattaaatttcaaaaaatatcgttctttaatggtaatgtaaaggtaaaattaagataatatgtaacaagcatgtgagtgtctaaggtgtccccgtggtggaaggaaaaaataaatccccataagtgtccaagatgcccatagagagcagagctgttctggtttaaacccctgctcttagcactgtgtttttccagctgtgggtggtgggggatgagtatctttttatttccatgagatgagaaaaatgaattactagaagtgtgaaatacaaaacacagctgctctttttttagccatagactcagcagccataaaattgctgtatccagttgcagaaattcctgctgcttactcttgaccctctctcggtttgtgtgcatctcctctcaggctggctcccagatgggagctggctccaggcgacactgggtgctctgctccaggaggtccttatgtgggtcctgccctagcctagcccctctcttatggactctgtcactgtgggtttatgattcactctcaatctgtcttacctcttggtgaactgttagagtcctgcctatactttggcgcttgtgggtgtgttgtggtacacatgatgtgttggtcacttcccagctcatcttgttctgagtcaccctagatttgggacattcattcgccaccagtaccgggcggtgtatggcctgagatttgggggggcttgtgctgctacaaattggggctgaatttgagttgacagtggaccttctttatgtctactgctcatatttgaattgcaaatactgcctcttctctttcagaggctcattaccctatagctgtattattgcaaagtgcacaattacagcttgagtgtaagtcacactgcgctggcaggacggcccactgagaaagggcacgtttcctgttcgttagttttcacattgacacataatttacaatacagtaaaatgtacttttctatcaactgtagtcagtaacagcccccctcccccaaccacatcaagatatagaggagtgctgtcacttcaaacagttccctcttcctctgccacatcctgcccctccccaggtctaaccaccaatccgtgctctgtccctctgttcagcccattgcagaaggccatagaaatagaatctataggctaggtgtggtggctcatgcctgtaatcccagtattttgagaggctgaagtgggaggatgacttgaggctgggagttcaagactagcctgggctgcctagcaagaccccatctccagaaaaaaaaaatttaaaaattacaatcacgtccctgtagttcagctgcttgggaggctgaggcaggaggatcacttgagctcaggagttagaggttacagtgagctatgatcgtgccactgtgctccagcctaggtgacacagcaagacgttgtctctggggaaaaaagaaagaaacggaaccacgcggtgtgcagccttctgagtctggcccctttcggtgagcagtgtctaaagttctgtcgcgtgttgcccacgcgtcggtggctcgctccttgcaactgctgagcattgtatggctaggctgtagtttgttttcacttcaccagttgggaaacagagaaaaggcactttttaaaaagtttaaatctgtagaattttggtttttaccagttctcttctaaatcctgagggattacaggaaaagttgttgtatttcagaatattcttagcttgatgtgacctctgtccccgttaaggccctttgccgcaatgggaaggacgtcgctcggtcagaccctgaaggtcagaggggcagtttgggagtgtgtcaacattttaactgtatggactagagccaagagtctcaaggtttataattcccacgtattcaaaaagaaaaaaacaataaagtgagaagtcagtgtagagtgaaataacctgtgttagtggggaagaagtgtttttaaacaggatttccataacgtataacatcaacatgtttagagtggtgatgtttcattgggaaacgaacagtaaaacatgaaagcagggaggttttcattctggcagttggcaactttcacggcagatggagaatttcaaaagcaattgctcaattatcaaacatagccagtgtgagttctgaaataaaggtgctgattgaatgtgcagctttatggtggattttgctattcaggcaagcattttaattttctgcctgttaaattctgttttctttagtttttcatatgtggtttattgtagcttaggaatagataactgagagtatatattacacatacaacattctgatatggcaatatttaaaacaacttgtctgttttagaactagaattaaacataatcatcttcagtattttgcaaataagctcactgccatccagaaacattgtcaatgcatctgttgctccttctagaagacacagtctgtccagcacaaagttacttagtccccagatgtctggagaagaggaggattctgacttggcagccaaacttggaatgtgcaatagagaaatagtacgaagaggggctctcattctcttctgtgattatgtcgtaagtttgaaatgcctgtaaacggggttgagggaggtggggaccaggagaacatcctgtgtagatgacacttgcatggaccctctggaacccagaccgcccggtgtcctgccaagctccatcgaaactaaatctagaatgaatgtttacttctgctgtgacatataattggagaccaggcctggccttccagtcactggattctaagttggactgtgagagtttttgcagctgactcatttatcaaatgcccggctattggctcacgcctacatgatgctgggtatgtttgttaatttgagggaagcaatggaataataataactaatgatttaaaaaacaaagtaagtgcattgactgtagtggggttctgattttaaatttttttaaaaattaataccaggagcagtggcttatgcctaaattccagcaactcgagaggctgaggtaggaagatcacttgagcccaggagtttgagacaagcctgggctatggtgtgagacacccatctctaaaaaaataaaaaataaaaaattatccaagtgtggtggctcgtgcctgtaatcacagctctttgagaagctgagggcggaggatggcttgagcctgggagttcgagaccagcctggcaacacagagaaaccctgcctctaccaaaaaaagaaagagaggaagaaagaaaaattagcctggcgtggtggtgcatgcctgtggtcccagccacctgagagactgagaagggaggattgcttgagcccagaagtttgaggctgcagtgagctgtgactgtgtcactgcactccggcctgggtgacaaggcgagacccctgctctaaaataatttttttaagttaatttgtagaaaaggtgttagatgttctttgtcacattttatgatggattcctgtttaaatgccgttctctttaaagaaaaaaaaataacttgtgggagtttttaaccataaaactagcatcacatatttaccatggagaatttacaaaaaaacaaataaacggaggaaaataaaacctcctgtaatcatactactcagagataacttgctgttagattttggtctagatttaatactttttctatatttatattaaaaatatttaaaacatatgcatttctttgtcacaaacatggtatcttatagatactactgtcacatagcaaaacagtgttaaatattctgaatcagaaaaggaagccgactctccaactgaaagaggtgttatcctagagactttttctggtgatgacaatttattaatagtcactttttgctttactttctctattgaagtagtttttctattttgttctacttttaaggataatataatttataatgctgtttttcacagaaatataagaaaaaagatactaattttataagttaataaagtttgatcatcccaaatccaaaaatctgaaatccaaaatgctccaaattctgaagctttttgagtgctgacattatgttcaaaggaaatgttcattggaaggtttcagattttcggatttagggagctcaacaaataagtataatgcacatatttcaaaacctgaaaaaaatcctaaattcagaatacttctgatcccaaacatttcagataagggttattcaacctgtactgtcagatgatcccaaatgaaaaatattaatcgttaaccaaatatcaaggaattgatcacattttacagtttctgcctaggattatgaatcaagatgaaaaggctctgcatgtttaaaaatatatatttttattttcttataaatcttaaatatctacacttaagatttatttgatatgtgggatccattcatattttggattcaacagttctgtcaaaactgtggcagtgataggggattctttttttcccactgaactatcacaaaattggaaaaagagtaattggagaaccccactggcttagccggcccgaagcccgggagagggcaggcagtgctgtggatggggtcatcccagcgcaacgctgcccctgctacctgcggatctcgctgaggcctgcctttgtcctttgacccttggccatttgttagtgtctctgagagctggactgctgtaccctacttccccagggggcctaacttcacacagcctctgccgcagtgcgtggttggaggtgacggccttggtaaatcgagtttcctacctcctcaattatttgtgctcatacactgtatatttttagtgaggtttatatttgggatgtgttttctccttcttaccctttctggcctttctatggcattaatacctggtctcttcttgtgtacttgaaaatgaatctctcatcatatttttccttagtgtcagaacctccatgactccgagcacttaacgtggctcattgtaaatcacattcaagatctgatcagcctttcccacgagcctccagtacaggacttcatcagtgccgttcatcggaactctgctgccagcggcctgttcatccaggcaattcagtctcgttgtgaaaacctttcaactgtacgtcttcatcctgccgactattgccagttgcagttttccctgccttaaaaatggagtattgaaatttttaactttaatttctgatttgcaaaatagtcatcttttgttcttttccttcttgctgttagccaaccatgctgaagaaaactcttcagtgcttggaggggatccatctcagccagtcgggagctgtgctcacgctgtatgtggacaggcttctgtgcacccctttccgtgtgctggctcgcatggtcgacatccttgcttgtcgccgggtagaaatgcttctggctgcaaatttacaggtattgggaagagaaaccctgatattgatttatattgaaaatttagcaggccaagcaaaacaggtggctggctttttcctccgtaagtatggtcttgacatggtcaccgatagaaacatggaaacatctgcaaacttgccgttactcgtgtgtccgatctgactgtttcttgtatttttttctagtctgcccttactaggatgaactgtacacatcagttcatcctttttaaatgagcatgaggttattttgggttgttaggtgttacaaacacactaatgtgtttttgtctattagagcagcatggcccagttgccaatggaagaactcaacagaatccaggaataccttcagagcagcgggctcgctcagaggtaatgctggaaacacaggtcgtccttgtgttaggacaacccaggatataaaggatatagatttgtacgggaataaattcacaggacaagaaatcgatgtgccttataggtgggtttactgcagaagtgccataatagaaccttcctacttttaaaacaaccagatctcactttctaaagagtaaaggatgaccggcaggatcacgtctgtgacgtgagtggaggcagtttgcactcctggtggctgtttgagaggtagcatttagaatgcctgtattcactgtcctgtgatgagtgggaaaataggttatcaggtttatcttagcaaaatcaaagcatgtcatctaattgctaaacaagagttggcaaatctgagagacattactcaatccttggcatgcaggacttacatctgcatcctgttgccattttatgtcttcaaagcatttaatcatttagttgtgtttgcaaagtctttgagaagcctttgtcagaaatccctacatctcctatgtgagtgtatttccatgactgcagaataagttaaacttttacctttttccttcccttgcggggcggggtggggggcagggattgtgtgtgtgagagggagagagagacagcagagaaggagaatataattatcatgctgtgtactttgagctgaaactgcaaaaaaggaaaaacacacaaaaattattatgcttttcagtctttagagtaccttgtctattatgcttttcagtctttagagtaccttgttgatggtgtttttaaatgggattgggcacaattaggtggacagtttgggatgatttttcagtctgtagggccaagctcttttgtaatttgcattatgaagttgtcactctcatagcagatggcgggagataaactattattactttttgaccctagacttagtcttcagtccagatgagggagattaaaagattataaatatcttgtgccagatgaggtgattttattttgaaatgaccatgaattcctatcagttgtcttactgggatatttgatagtggaatttgtgcatttgagtcttagatgatctgttttacatttattaagaaagcctttattagcttttatactgtgtattgcctgttgcagtgtttgagtataaatgaaatttctggaaaatattaatggagtacaaactgtgatacttaaaagtaaactagggcctgcatttgtatcatgacctgtttgagtattgatgagaagatagctgtgaagaaaaaggtttaaacaagtgtattttcctttaagaagccactaatagtgcatctccttagagtgtatatttctagaatcctagtgtgcagagtttagactaagactaaaaaaaaaaaaaaacaaattatactgtaatttcatttttatttgtattttagacaccaaaggctctattccctgctggacaggtttcgtctctccaccatgcaagactcacttagtccctctcctccagtctcttcccacccgctggacggggatgggcacgtgtcactggaaacagtgagtccggacaaagtaagtgtccagcgtgtctgcatgggaggcacagggcgctgagtgcctctgtcacctgtggcagatacagagagtgcagaggaggtgccgtggacccaaggagttctggcgctcggctcggctcagtgaagctgtggttagagacgtggggggccatcaaggtctgagggagccaagcagtgctgatgtgggacccttttggtaggagtgtggggtgagtagttagtgggtgaatcaaggaatagtcggccgtggcctgcaggcccctgactgcacaggccttcaagcacatgtcaatgccgttagcctccctccatctcctcataccttctggccacctgtgagttgcactgccactgccagccattctggtatgttgtcagcacctccactgctcatacctcatggttagggaccacctggagccttggtagagccttggtagagccttggtactctactttcctggacaaagttcagcttatgaatatgaatttagatttcaaaaaccagcagcccaagtataagaaagcgaaggttcagtcctgccttcttaggctctattcgctaagcacctgccctgccctggttgctggggagagatgagtaaagcagacaacccaggagaggatggcaaaggggccgctaacccttagtggtttagctatatttggaaggcctattggaagttcaccaggtgaagggggaggctgtgagggtgcccaggcaggtaacagaagtccaaaggggaaaacctgtggtgtggtgagccgtatagccacagcctgccggccggcagccctctcagcctagtgcggtgttcccaagcactggcctaggcctgtagctccagggatgtgaagtccccttgaacgccgcccatcatgttccccttatccatttttttcttcccaggactggtacgttcatcttgtcaaatcccagtgttggaccaggtcagattctgcactgctggaaggtgcagagctggtgaatcggattcctgctgaagatatgaatgccttcatgatgaactcggtacggggggagcagtggaggcaaggaatcctcagcttttcttgtgacttccaagtgggatttgtctcatcatcatgtgacccacttgttgacaacacatgttggggactccagtctgggcagggacgggatgtcggagagactccactctgaatggggccgggaagtggggaggactccatttcagatggggtcgggacatgggggttatgctgatcgagacagaaaagcacattgtttcagccacattagaatccacggaggtgttgttttgaaatccagctggccccaaggctgggtgtatggtttgggatgagaactatctggcctccactggaggaacaaacacaggatgttatcatctaagctccatggccaagacagaatggaagtcaaggttgcgtatttgccgtagacttcaacacagtgtcgtaatgcgtgacgtcaataacttgtttctagtgtcttggaagttgatctttagtcgtaaaagagacccttggatgcagcgagatttcctctactcacacctctgttagatgtagtgaggttcttcaccccccaaccccagatgtcagagggcaccctgcgcagagctaggaggccatgcaaagccttggtgtccctgtccctcacccgtgggcaggtcctgtgagcagtgggggggccacctcttgggtatggtgcagccatggcccaagcagggcttcttctcagacctactaggacgggagaaacctcctggtgctttagccctgcgttgatatgcagcaaatgggagggaagtgggcacctgggaggacaaatgcctgtagaggccgggagtgacggcaggtgttcatgaaaagagaccttgtggggagggcaacacaacagtgtgttctgatgtactgaagagctcaactgaaaacaacaggagaattagcccaaaatccatttactaaaattgtttatctttttttttttttttgagacaaagtctcgctgttgtcccccaggctggagtgcaatggcgctatcttggctcactgcaacctccgcctcctgggttcatacgattctcctgcctcagcctcccaaatagctggtattaacaggcatgcaccaccacgcccggctaatttttgtatttttagtagagacgggatttcaccatgttggccaggctggtctcaaactcctgacctcaggtgatccgcccacctcggcctcccaaagtgctgggattataggcctgagccaccacgcccggcctaaaattgtttatcttaagattcatgcagtgaaagctaacttactgagtgataaatttgcttagtgatctgtttattaggttttccaaatttgctaattgggctttgaacagctgtaaaagttctgactgtaaaagaaagcttcaacttttggcattcatgatgcttttctgagtattaaactaagatagatgttttacctgaaggatcggccaccaatctttaaatggctaaacaaaagggttgctaaaacataatccaaattgacataagaaataccatttttccaaccaaaattttggcattcatatggctacttttacgtatttcagctgcatttgaacatctttttcaaactttagggtggttggtgtatcactgaggtcttggatgacactttagctttgattttgtttttatgaattaaaattgtcataccaaaatttttatttcaagcaaatccaagagcataaaaaattaaaatattacttaaaatactaagagagaacagatatatattttactaagcatatgttgaatgaaattgttcaaatatttataacaggcatagagtagaattttcttaaaaatatttttgatggtataccaatttgtattttctcagaaacatttgccttattcttttttctgttgtgtttttcttacctgattgaaagctcataatctgttgttattgtttgttaacctttaatgctctgatttcaggagttcaacctaagcctgctagctccatgcttaagcctagggatgagtgaaatttctggtggccagaagagtgccctttttgaagcagcccgtgaggtgactctggcccgtgtgagcggcaccgtgcagcagctccctgctgtccatcatgtcttccagcccgagctgcctgcagagccggcggcctactggagcaagttgaatgatctgtttggtaattaaaattaaaatttatcttatttttaaaaagcattccagggccagtatagtactttgcaccaagtaaatgtacaataaaggcagtggatctaatacattgaaagcgtttacagaggtagctaaagagcagcacgggtgtcctcggctcagaatttcttcctgtgtgtttgccactttgccattcattgacatggtcatggacatagggctctaagcccttgaggaaggctgggccagacctcaggggagatgcagccccaaaccacgtgcagtcctgtggacggatgtgtagatgtgccactgaggaacaatgtcttgagctttcatcagattctcagagaattgcttgactgcctttcgaagttgatgcatctgtgctcacgtttgcacccacccacgaggtccttctgtttcaggggatgctgcactgtatcagtccctgcccactctggcccgggccctggcacagtacctggtggtggtctccaaactgcccagtcatttgcaccttcctcctgagaaagagaaggacattgtgaaattcgtggtggcaacccttgaggtaagaggcagctcgggagctcagtgttgctgtggggagggggcatggggctgacactgaagagggtaaagcagttttatttgaaaagcaagatctctgaccagtccagtcacttttccatctcagcctggcagtaagtcttgtcaccgtcaagttattgtagccatccttcaccctcacctcgccactcctcatggtggcctgtgaggtcagccaggtccccttctcatctgcacctaccatgttaggtggatcctaattttagagacatgaaaaataatcatctggaagtactttatgtcttaagttggcctggacatgtcagccaaggaatacttacttggtttgtgttagtgcttgtaattcgcccccagaatgtgtacacgttctggatgcattaaagtctggcctgtatccttaaagggccatcgctgtgctgcctgccctcagcaaggacacactttgcagacccacagaggctccgcctccacctcacaccaaagaaagggaggagtccaaagggcatcagtgccattactcacaaaatgataaatacacccttattctgaaccacgtggagtcatatggtttgtgatccctgtccttcaggtttcagcttagtggggaagtgggaaagtcagcgtgtgatcacagcacagggtgattgctgctgattatattatgtgcctgctgtatgcaggatgaaatactttatatgcgtcatcttatttgactctcacaaccccctgtgagataggctctgttactcccatttgacaggtgaggaaagcaaggcttagagaatttcagtgacttgcccaggtcctctgagctaggaagtagccattctggcatttgaacccaaggcctgctatccctagaacccacgctctcaaattcaacctatgacagaggcaagccctggtgctgtgggagccccaaggaagagcctctggcctggtggccacgtagcccaggagagatttctacaggagcccacagcgctgaaggagagagaggcagcagagtaagggggctttgtggcagagaggggactggcactttggggaataggtgggtcaggactgaatgtaatggagccatgtcagagctgtccttctggaagggcaagggcacctggacgcgctgcccctcagtgctttggacggttccacaactgtgattcacacggcttccccaaacgaaggtacacgagtgggcattctgtgactcggtacttccctttaggccctgtcctggcatttgatccatgagcagatcccgctgagtctggatctccaggcagggctggactgctgctgcctggccctgcagctgcctggcctctggagcgtggtctcctccacagagtttgtgacccacgcctgctccctcatctactgtgtgcacttcatcctggaggccggtgagtccccgtccatgaacggtgggttcctatcatagttcctgtctgcttcaccatgtttttattttgtgctgcctgtttgccaggtactaagctaggaattggggatggagaggtagataaaatatgcatcaggaagggctgggccccatctcttactctccaatatattggagtctacactggaatttaactggaatttgcttttttagtcattttatttagattttgaagtttcagctttcatcaaaaatacctctaaactttatgtctctgtgatctttggtcttagctgttttatgtatttagtcttatatgatcataagattaataacattacattcagaagattatttgttttctgtcagagttaaaatgtttgtttttatactgcattgtaatattaacgtactgtaaaataaaagtggcttgttcttttcaaggaacagtatcctcaacaagggtcattagccacaatttttaaaaaattggacgtcatagtttacatgttagagggcgttttgaagctttgtatttttaaattaaatgttatagagtgatgttttcatgtttcataattgttttcatctgtgcatttgtagccaacttgaaaacaaagatccagggattactacttaaaagccagacttcttggaggttatagtgatgattttgatagtatcttgagccgtctcataataacctcagggtgagagatggccaacaggagacagtcgagggacttagaaatctgaatgaaatctgaagttcaaatcttcagacatataccactaaccaagagattggtacctcagtctagtattgtctgtttgtctaaaattggttctaaggaatctaggctagtctgtctatccctttcaacttttgtgaggctgcacaaatgtaaaatgttgaataaaaagcactgatggaagtgtgtagaaattcttctctttgttctgttgtaattttagttgcagtgcagcctggagagcagcttcttagtccagaaagaaggacaaataccccaaaagccatcagcgaggaggaggaggaagtagatccaaacacacagagtaagtctcaggacccatttttttcttacatgttgttcctccaggacttaaaaatcattcacagagacgtgcaccgcggtgagtgtggactcctggaagcgcaccgtagctccgctgtgtcctgctgctcctccctagctgtcagggaggctgtagtccattgctttgccagctcttttgtttccgagtgaacaccttatccgtacacatgcggctgtctctgaccctacagaccagctgggatgccactgggggagcgctcccttccccccgcacttcccacactctgcagttattctgagatccttgagggcagggaacaggtttgtcttctttgtgttctcagaaattaatgctcggcctctggtcagcaagcaacaaccttttgttgagtgataatgaataaataaatgtttcccacatgagtattcagtaacctcagtgtcaggttcagccatctgttttggtggatatttaaaagaaaattccgcttttcctacagaaaaaaaaaaaaatccaaatcccagtgatttaagccagttatagacttagacatatactacggcttttcatgcactttcctcccaattctagagtaggtattttactaggaaaatggtggcagtgcctgttgggaggaagattctttggccaagtgtcttttgttcttgccagggcccctaggctgctggggtgcttcagcttctttagcccagtgtctggtggggaatggcccctgttgcctgtcccacagaggtgggggtgcctcacctggagcctgtccacacattttacacagcacgcttacctggagcatcaggcatcttttccatgctctgtggctcaggaaacacgccttttcaatcatgagtgcaccagtgcttttgggctttttctccccgcttttgtgcaatcctggttgtggatggagttttcctgtctttagtcttctgcatagtacttttctcttctggttcccggttcaaggttttgtaattagagaatgacccagaagcaatggcattttaatgcacagccaaggacttctctgaatttgtatctcaaacctctgtgggtccttcaggcttcagtttgtgatttcatgatttcttgttgctacctaaggaatatgaaaacacccacctccctactctgcatcttccagccgagtggcacctcaggctgtggatcctgtgcttctgtggtgaggataagaatagtgccaaccgtgtggattgaaatcaatcagttaatccctccatgtaaagcacctggaacggatgacagtcttgttatgaatactcaacaaatgctatcatgatttttagttagatttccattgctttaaaacagttgagacatcttggcggtttgagttagagcaacgggccctgaagtgggttctgtttgggtgaagatgattatgcttattccccatggccctctttaggcaagagtgggaagctttctttgtttttttaatcacctcgataggacgttacttcttaaaggtcatccaataaatattaataggccgggcgcggtggctcacgcctgtaatcccagcactttgggaggccgaggcgggcggatcacgaggtcaggagatcgagaccatcccagctaaaacggtgaaaccccgtctctactaaaaatacaaaaaattagccgggcgtagtggcgggcgcctgtagtcccagctacttgggaggctgaggcaggagaatggcgtgaacccgggaggcggagcttgcagtgagccgagatcccgccactgcactccagcctgggcgacagagcaagactccgtctcaaaaaaaaaaaaaaatattaataaagccaactcgttagcgtggggcttaattgcttaagtccaatgagaagtccttctctatcctaggaagttgcccaaactgtagaatctcgtggcctgtgggtaatagccacgtaatacacactcactgcctcaacaaatcatattttagtaggtatgatattctagactcaagacaccattctgtggatcttcccaagggtgtgaagtgtccacagcgtctgccttgggagtttccatgcccaccagaaccatgccccaagcccctcaagcactctgacctaggaaagccagtgaagcaaggatgacaacatggccctttgatactagctgagggacagacacaggtcctgggagaccagagaaagacgaggggcagaggaggtgtcctaaaggaagtctgaggctgaggagccacaggatggcttccagctgtcacaggctgctgctggccttatcacagagagtgggccagagggctgggaaccaaggccagagctcaggttcaggaccattccagcaatcccagcagaaaatggggagaattgtatggtataggcggatatgaaggtagaatctgcaggccttcagtggccaactcagagtctaagtggattccacagttacagcttgagcagctggttgtaggtcatgctttctacactgggcatataggatgtgttttttaaaaagtcctctcttaaccgttgcttgtttagatcctaagtatatcactgcagcctgtgagatggtggcagaaatggtggagtctctgcagtcggtgttggccttgggtcataaaaggaatagcggcgtgccggcgtttctcacgccattgctaaggaacatcatcatcagcctggcccgcctgccccttgtcaacagctacacacgtgtgcccccactggtgagtctgctcgttccttgcagaagaccaagtacggtgaaaggcaccggtaggccctgggctgggcacacgtgagagggcgggacagaatccccgcagcccagaggctgcctgctgtggttctggtgcccactgtggttctggtgccaggctgctttcctcaggcaccacgtgtggaggtcgctagtagaaatactgggttttctaaaatgaactgaggccctacatccctaagagattagtgttagacctgattctagagcaactagaccactttgcttaatagcagaccagaaaccacaccccctcgagtgagtgagattttcctttggagataattcatgtttttctacacagttttgcagttgtcttcagaattggtttaaagtaggtgttattgccaggcgcagtagctcatgcctgtaatcccagcactttgggaagccaaggtgggcggatcacttgaggtcaggatttcgagaccagcctggccaacatggtgaaaccccatctctactaaaaatataaaaattagccaggtgtggtggtgtacgcctgtaatcccagctactcaggagactgagacaggagaatcgcttgaacccaggaggcgaaggttgcagtaagccgagatcgcgccactgcactctagcctgggcaacagagcaagactccgtctcaaaaaaaaaaaaggtaggtgttattgatcagaacccttgtttcagataacatgaggagcttagcttgaggagagtgagggttgatggagggggactgacttctgcccagtgaaatggcatcatctcccaccagcccgctgaaataagatgatggggcctgttccttagggcctgcagcatcctcaggcaggaaagaaaggccgacctggcagggtgtgagccagcaggtgtaggtcagggagaatggagccaggtcccagggaagaggcttgtggctgcctgagaagggtgcgtgcctgcctgtgtgtgtgtgtgcacgtgtgtgtatgtatgctggagagtctagggaggcttgctccaaggacgcagtattgtttgatcctgagagataaggattctgccgcagggaatgaaggtattccagatggcgggcttattccgaagaagaggccagtgcctggcggtgctggaagcagttgcagaacagggagttgtaggctttcctgggaagagagcagcaggggtgctggagaagcaggccacacttgctgcatggggttgctctcggccccactcttggtgcacagcgagtcactgtgggttcattagcatctggttatgagacagtaactgctcctttggaggggctcgtggagaccatgcaggagggcacggtcttgaggtcatgccgtccagagcacacctgaggataggccaggacgggctgcacgctgtaggtaaaattcctccagcaagctcttcactggcattgaggagttccctgagtgcggtcatctggaaggcagctgtaacaggcactgcagtctctccctgggtgggtaccagagaggagcataggggagcataaccgatttaaagagagggctttcctgtggtgaggtaagagattagctggtcattatcatagagccccctctgcctttgtgcagatgggctgtgggaatcctggggttccgttgggtcctttgtcacctcactgaaggcatgtaagctgagctggccagaccgtgagctgatcctgccacttgaacagcatcaagcctgcctctggattcttctgtgcatggcacttgtctgagcacctcacgcacagagaactggacttcagagtttacagaaataagctgtatggttcattttcatgcctgcttgccaataaacatatctgagctgaacctcattgaacgcctgcctttattctagcacagcacctgctgtttgtgggcgaggggtgctgtctctaactcctgcctgcttctcccagcactccctgagtggggtgtgccagcagcctcaggatgaggacaggaagtgggagggcagagcagatttgggagggccacttgatggggaaggaagtcccaggaagcagttggagctgttttctgggggagaaggtgccagctctgggacagtgttggggtagtgaggagggagcccagtggagagaagtcgggcttcctgcttcctcacagtatgtctgtcctgactcaactcggatgatgtcacttccttttcatcttctcaggtgtggaagcttggatggtcacccaaaccgggaggggattttggcacagcattccctgagatccccgtggagttcctccaggaaaaggaagtctttaaggagttcatctaccgcatcaacacactaggtactcttggggcctctccttcaggtcaccattgtcggacatctaccgggaggaaatccagagcccccagtactgggatcttctcatttgactccagaaaagatttaagcatgataataatacaaacctatgtgaatacattttgcagtgttggcaaaactccttttatactgagaaaatagatcccagttcctgtgttttgtggcttgaatcccagctttgtgtattccgggcttgtttgaagtcaggaaaggttcatgtgtagtggacaacgtgagaccaaattctgccttagattttgcatttaggctaaacagtggcagcacttgtctcagaatgttttcttgtgttcaccagtctgatcctgttgtgtctcagtggtccattttctcatatgggaacaagcagacgggagcagatggagtcaggtttcttggcactcgccttccccagagcctagaggcagcatggggagaaagcaggcttggggctcagacagtcctggtctgcttccagccctcctacctgagcagcgcagggcaagtccgtctaacctctagagaccctcagttttgtcatatgtaaaatgggggtcgtgtctatttcatagaattgttgcagatttagaaattacatttctaaacaaatgttaccccttatttctaaataagtgtctaaatgaataagtcaccacttttgcccctatttgatggcaagaggtgtgatcttgtggtgggactgtaatcagtcagttctcagtgactgtgccctgctgtggtgtttcctggaatgttcctgtcttgtcctagaaagtctggcaggggcaccctgactccactgtccagtcctctccccagtccctcgggcttctgcagatttgaggcttgtttggatcccagaaggttgtggcaggagacaccttgcctctactttcccctttataattcaatgtccaaagagagccctgagcaggtacctcacgccagctgcctcacggagctcctcctcttcctggctgtgaggatcggtatcagtggcctcctgctctctcccccttgcctaacacgagcacctttgcttacttgggtgcccttgctcttgaactgcccatcggacgtgcgtgacccaagactgtgccgcagtccttgccttgtctgtgctcattttctttgttcatttttttccctgtaacgtaaattgttatatttgtctgtatctgtgtctgaatcagtcctgcacgctctccttctctctgtctcttgttctttctttaccccgtttatcacggggaccccgatgtccattgctctagttctcctgtcctaagcaccccatcccgtctctctggccttaccacaagtggcgtggctgcctcagacatcatgatggggacatgaagcacagctgtcagaaacaactgttcgttagatacactcgaatgcagctcatcaatagggatggagggtctgtcggatgtattttcactgaatccccgttcctaccttgatacactctttttaatctattcttctagacaggtcagaggaaccattactttgacttttaaatttttagcagctttattgaggtagaattcacatactacagatttcacccactctaagcggacagcttggtggccattagttttatccacagagttgtgcagccagctgcacagtctcagggctggactccagggaagattttagcccatttagtgagtggggcagaagtggccctggccctgcacgaggttgcctgcatgggcgtccctgccctgtccctgtgtctgctccactgggggttgaccaggctgccagggccgacttgggcctgtgccacctgcctctcatgtgtctcggacagtgcagccgatgtctatacttcggtttcctcaatgatgaaatggaggggatagtgttccccgcatcatagaactgtgtgaggtttaagggactcactgcccttggcgtggagccttctccaggggccgtgctgtgtcggcgtagctgtcagctctccgttacaggcttgagaagggttgacactctctcatgtaacatttatatttctaggctggaccagtcgtactcagtttgaagaaacttgggccaccctccttggtgtcctggtgacgcagcccctcgtgatggagcaggaggagagcccaccagaagtaaggccacaccctgtgctggttggcacatgggcagttatggccgcttgcaggcctttggtggggaataaaataaggcagcaagctggtgttctttttttctcttaccttatttttgaaagagtagctgaatggtgtcttgactgatattccagagcagggacaaagcctgctgaggtctgggggctgcgattaccaatggctggaatgcattttattacggtgcattccatgttaaggatcaatacgattgtgccctttctggaaaatatcttttagtttatcaatattcagaggagtgtaggttgaattaaaatgaaaaggcactttataaaggccatgagtagtacctggtttcatttttctaatgtcttgcagagattttatcaggcttcttgaagtgttcacgtacattacgctaacacgatattaataataactgtgctctggtacagcggagccagcagaatgggaagttgtggaatgcaggcccttgattctgatagaaggtgtggtttgaactcacagaaatgacagtttggagggtagacatatgtcacaagtcatcaagattgtctttaaattcatgcatagaagctaacagggtgtcataagcaaggcctgtaaaatgtatgagggaattcaaagataatttattaaaaagtaattcatgtttggagttttgtgcccaaaggagtccttgatttgaaaaatgggcttttgcccatcagattgtttcagggcccgtgtgtgcggaggccctgccttgtgccccgtgagctcagcctgacagaaatcctttggtagcacttaaggctcctcttcctcccattgaggcagggaagactctgggttctgcaggcagaggtggttgtgggtgtcttgctgctcttgttgacatgtgggctctccttccaggaagacacagagaggacccagatcaacgtcctggccgtgcaggccatcacctcactggtgctcagtgcaatgactgtgcctgtggccggcaacccagctgtaagctgcttggagcagcagccccggaacaagcctctgaaagctctcgacaccaggtttgcttgagttcccacgtgtctctgggacatagcaggtgctggggacagtgggttccccgctgaagcgtccagcagcttcaaccaggccgttttccttcattgctagaattgaaaacaccgtccgtgtggcctgtgcaggagatgcagacccaaaggtggcctcctggtcagtgagaagctggaaacgtgacaggaactgacgtggggttattgagcatttaggggaagacgttagcagagcaggaatgagcaggcaactagtagaacacccacttaagggctcacggacaggtgctcacttaggaagtgagtttcatttggtattacaccaggttcctttaggcaaagcggagggaaagttctggtgtttttcacttgtaagattttgaaggaaacaaaacactctttaccttttttctaaaatgtaggtttgggaggaagctgagcattatcagagggattgtggagcaagagattcaagcaatggtttcaaagagagagaatattgccacccatcatttatatcaggcatgggatcctgtcccttctctgtctccggctactacaggtacctgagggaaagggtgcgggggagcggttgtacttgggctagaatgagagaagactggcatgctcaccacaccagtgatgcgggaagacctgagtgtggtctgagttggaggctgtggtgctaaatacgctgcccctttcataagcaggagtcttagtcaggcccagggaggaagtaaaatctggaaatgaatgagaagcattctctcctgccagtcaagaaatgagaagcgaaagaattctcacgggctgtaagaccagcaggatttaaaagttgaattagttgcttatgttaagaactcaaccaagttcatctacacaagctgaatctccagcttttcctaagaaaccatgtgtggcagtggctgcagggcagggcacagctgggcctgagcaccccgctccctgcacctctcccctccctgggccctgcctgtcactgcccactctcccaccaagccttccggttgtgtgcctgccctatcacaggcatcggagcttgtcacctggtttaaaagaagagagttgtgtggggatttgggatgcacgtttttcactcaaaagtattttagcgtagagctctgtgattccgtagctatttaggagtttaagcaccttgaaggctttaattgcagaaagttctatgtggacgtgcaatgtgttatacgcagtgtctatgagactcaaatgtttattagggcgttgaagtaaactgagcacttggagggccatggatccagccttcaaggagctcataagtcaggaggacccaggagcaatgacctgtcatagaaggcagaaaagaggggcacagaggtgggtgggaggcatacacaggcagctcctggagctccaaggggagcaagtgcttccagggaagggggcgtggaggcccctttggaggaggcaagttgatctggggtctggcagagggttagctggggacatttagcgggaggctggtgcccgggaattggggggatgcccagcagaaagacatgaggaggctggcctggggcgtgggggggtgtgaaaggttaagtgggggcattatcctgctcccgctcctgccggctgtatctggtcagcctgggcaccgaggtggggttctggaaggcactgttcaccaaaatgcttatctgggtcccccagagagcttgcctgcctggactgtcggctcgcctgcaactgctgactcctaagcttttgcagctcagcccacaaccagttcctattcacagaggtgggagctgaggggtgacaagtgactgctgcagtcttatttgtcatagagaaaaagtgacagagtccagcttgcccactggccctgccagcttaactggttataaagtgacaaatccccaagacccacagggctctgcacaacctgggccctcctgccagtggcggcgagggcaggtggctcacggctgggtgcctgtctgggcaggagctgggctggtatggggtgggcctgcggccctgcccccctgtgcagatcaagactcagggtgctggtgttcacaggtgccctcatcagccacgagaagctgctgctacagatcaaccccgagcgggagctggggagcatgagctacaaactcggccaggtcagtctcgcgcccccgccgcctggcctctgtccgtttctgtcctcagactttggcgcttgacacacccaggagaaaagctcagtgcactttttaaatgaaaggaagttttccttttttttaaaaaaaaatttaatgttcattgtttttatctgttttattcctaggtcccgcaagcagaggaagcattagttttgtttttatttatgttctgtattccagaaagtagttaagagacctcacatgtagcgatagagatgtgtgtaagagacagtgagagggcgtgacttggacttaagcaaggaccgtgagacacaaaaaggggggtgaggacagagtggagtcagctgaaatgctcaggaggaagtagacgccatgaagggccatggtatggggggccgcaggcgtggccgtgagtgtccctggggccagctcttggggggctccctgagtgtccctgtccctgtggccagttctgggtgggagccccgtgtgcaggcagacagctcggccacttcctagcaggtcacattggtctgtgcttctgtttcctcctcagataagtgaagggattcaagggtctgggtgtggtggctaacacctgtaatctataacattttaggaggctgaggcaggaggcttacctgagctcaggaggttgaggctgcagtgagccatgattgcaccactgcactccagcctgggcaacagaccagtactctgtcccttaaaaaaaaatgtaaacagaaacgtagggccatttgcatatgatggcacatggcgtggagccctacaggtgtatgctgggcggggcccggctgtgctggccgacttgcacctttccctccaccccggtgctgtgtctttcgctcaccgggttcctgatttagtgaaagcagttgtgcaggacagttctctttgtagcttttgtttctgtggaaatgggtcagaatatggtgtttagaaacacttatgagctctgagagtttcctcttctgagttcctggcctgcagccttcacagcagaaaccctgtgatgtcacaagcctgtttctgttccctgctctctgcctgtactgtcctgttttgtgcctgccggtttcagtgacaggaagcagggagctactggaccagcctgtatttttctagacatagttggaaaaagaagtcccactcttctgtcctttcacctttgacagatgtttccaccccaagataagtgaaaatgaccaataggatgcactgtatttttcatgaaagtgtttctgaagggcaggctgagagtgagaggcctggggctcactgggtgcctctggccttgtcctgggcccagggacactggtctgtgcccgaggtattccctatccccccaaccccgctgcatttggccacatccttcaatgtttgcgttgtgtccagcgtccgcaaaccaactgtcatgggatcatactggggctgaagtacggtcccacccctgccctgtctggggctgaagtacagtgccacccctgccctgtctggggctgaaggacagtgccacccctgccctgtctggggctgaagtacagtgccacccctgccctgtctggggctgaaggacagtgccaccccttccctgtctggggctgaaggacagtgccacccctgccctgtctggggctgaaggacagtgccacccctgccctgtctggggctgaaggacagtgccacccctgccctgtctggggctgaaggacagtgccacccctgccctgtctggggctgaaggacagtgccacccctgccctgtctggggctgaaggacagtgccacccctgccctgtctggggctgaaggacagtgccacccctgccctgtctggggctgaaggacagtgccacccctgccctgtctggggctgaaggacagtgccacccctgccctgtctggggctgaaggacagtgccacccctgccctgtctggggctgaaggacagtgccacccctgccctgtctggggctgaaggacagtgccacccctgccctgtctggggctgaaggacagtgccacccctgccctgtctggggctgaaggacagtgccacccctgccctgtctgggatgtttagcccctagatgccactggactgagccgctacttgcttttgggaaagaggggtgggggttaggggtctgggcgaggggagtgcaggggctcctccttggcctgagagctgttcatacagactcctcgcccactccctgcagggtgctgggtcccaggggggaaatggcccttggtgccaagaacgtgagttggggctagtgccagtgatgatggagaacagctttttatgggcacacagcccacagcactgtgccaagtgctcgaggcttcccgagaaccaggcagaaaggaggacagtcgaggtgtgctgactgcgtggtggctgcgtgatctagagcgcgggtcacaaaggcgcgagggagctctggccttgggtttaccgcaatgactgccagtgcgggagactggaaaaggaatctcacgtattggttccgtgttttggggactccattcagatgtcacttaggagtgaaagcatcccttcgtagagcctctttctgtgtcaccctcctcagctgctcctggggttgactggcccctgattcatgcctttagcatgtgctggagcttcccagcagctgtccagcccctgccccaccctctctgtgggctcccttgcccgtaacctggggtgtctgaacgacccttgctaaggggcagactgttagacggtaggcatgtgctgagtcccagtggccacacccacccaccaggagcctggcactgtggccgcagcactgagcagtgccccgtttctgtggcaggtgtccatacactccgtgtggctggggaacagcatcacacccctgagggaggaggaatgggacgaggaagaggaggaggaggccgacgcccctgcaccttcgtcaccacccacgtctccagtcaactccaggttttccaatggcctttttctttttaacagaaatttgaaatttcttatcagtcatttgatttgtttgaggtgcttcttgaaatgagcctctcatctcatgtacttggaaaatacccatctcgcatattccacaggaaacaccgggctggagttgacatccactcctgttcgcagtttttgcttgagttgtacagccgctggatcctgccgtccagctcagccaggaggaccccggccatcctgatcagtgaggtggtcagatccgtaagtgagccttcccattcccctcacacctgcacgtgccacacgcaccacacacgccacacaccccacacacacacaccgcccacacacatgccacttgcacacacacccctcatgcatgcaacacacacacaggccacacgcaccatagacaccacacacacatgccacatgcacacacatacacggcatgcaccatacacacaacacacacagcacacatgccacacacacacgccacaccacatgcaccacacacatgccacatgcacacacactccacatgcatgcaccacacacacacacacacaccacacacaccacatgcaccacaccacacaggttacatgcacacaacacacacatgccacgtgcacacaccccacacaccacatgtatgtgccacacacagcacacaaccacacacatgcaccacacacatgccacatgtgcatgcaccagacacatggcacacactacacacacgccacgtgcacacaccccacacacatgtacgcaccacacacatgccacacacacatgcaccacacacatgccacatgtacacacatgtatatacacaccccacaccacacacacaccacttgcacaccacgcacacacaccacatgcgcacacacacaccacatacgccacatgtacacaccatacacacaccatacatgcaccacgtgtaccacgcacccacacagacacagcacacgcatacaccacacacacacgcacacatgcgtcccgcacagtaatgtctcttgggtgtaagaacacgacttgccagtagtagcgttctggatgcgttgcctggattctaacagcgcgattctccccttgccctcctggttttccacatctccagcttctagtggtctcagacttgttcaccgagcgcaaccagtttgagctgatgtatgtgacgctgacagaactgcgaagggtgcacccttcagaagacgagatcctcgctcagtacctggtgcctgccacctgcaaggcagctgccgtccttgggatggtaagtgacaggtggcacagaggtttctgtgctgaagccacgggggcccatctgccttgggacctggtgttggccagaggtgccgggtgcggctgcctccttccaagagttgacccgaaccggactccacggcccacgtgagctgcagtgcttctcagatggagggggttcagcgacggtcagtgccattcacaggtcactgtgatgtgggttgtggcggccaagccatggtttggggtcccgtatccctgggcttatgacatcattgtagtagcccatccccacagaaccacggtgtgtggtggcgctgaggcatcgtagatggtggaaatgctactggcttccccatgctctgccctgaggcctgactgcctcactccccttctcagttatgttccaggccccccgagcttcctggctggacagcttctctcctgggggccgttttgtcacagtgaccctgtgtttctagtcccaaatctgggtgctatagtctctttttagcgtggtggttgtcttagtcttttttggctgctaccacaagttaccttagactgggtaatttataaacagtggaaatttacttctcaccgttctgggggctggaagttttcatggtcaaggtgccagcagatttggtgtgtgatgagggctgctctctgcttcatagatggcatcttctggctgggtcctcacggtggaaggagtgaacaagctccctcaggccttttagaagggccccaatccacaagggctctcccatcatgacctcatcacctcccaaggccccaccttcttgtactgtggcactgcaaattaggtgtcagtgtaggagtttcaggagggatagaaacattcagaccatcccagcggtcaagtgttcatcctcttgagttcctccttattctgcttctggtttatcaggattcagccagtgcagcatggtacctgtattctgtggcacatcaccacatggtatttgccaagtatccatcacctgcacacgtgaaatcattgcccgtgggtcccgacatctggcgaagcatattcaaggatggcagaactgtcagagctggcacctctggttccttgtcatgtggcattacctagtaatccattttatgatagcaatggaaactcatttcttcaacaaacacctgagtggctgccgtgtgccagccgtctggggcccttggtgagaatggcatggtggtgcccatcagggcctgcctagcccgtgctctggacgggctcctgtgtgtcaggaacgacaatgctgtcatgacggtgaatgatttttttttttgccatcactccagccgctaacatttgcggagctcttcctcccgcacccccacctgacaaggccaagggtgaccttggccccaccctaggcggccaaggtcagaggttagctggcttgtctgggtcacacaaaatgcagcagaggttgaggtgagcacatgtccgtgacctggagcctgactccctctctgcgagtcttgactgctcttgcctagactctgtcctccccgagcccaaacgccagtcatcttcccttgtgggtgtccttcagcctggtgccatgctggtgactcagcagccgtccagggagtggaaacaattgagtgtgtgggttccctgtgtgggcatctctcttcacggcgaacaccctctgggtgttgcccacacgatgtcaaagcggctcttggaaggggtccttctcctttgtgggaagtttcagctgctgggctaacttgaattgtaactgtggttttgtgctcaggcccagatccccctaggcaagtgttgtgccatcagtaatcaaatgagaaataatcattttgaaaagcagatcctaaggcaggatggtcatggacactcactcccagctctttgtgcactcatgctttctggaagatggccatcctctgtgaaggttttcagcgcgtcatgcttggtacccacgtatccagagcatgtcgttttgaggtatttgcccaccgttgtgaaatccgtgccacccgagagcaggtcctgatgtggggctttcagaagtgggacctggggccgtacgcagtccttagggaggggccgtgtggcgttgtgcgtgtgaggggatagcacagggtgaggtgggggcccaagaaggaagtgacccacaaagaacagcctcctcttttggtccttgttcctgggatggctgggagtggcttctgtgtcgtccggccatttcccctgcggagaggctcctaccactgccgagaacctcatcattccacaaaaacaagaggccgcctggccatccagcgctccatgggaattctgtgtccccatagtcttgggctgaaggagggtgacattccttgctgacttctgcaggggtctcctcactgttaaagagcagattgaaagtgaagaacgtgggctaagtgtttaggtcgatatttaaccctgctaggttttggatactaagtgaaattgaggccattttggttgaagttgacagaaaccactatcagggatccccaagactaccccaggcttttctagaaagactctcagctaagatgtgttatggtaaaagcacacaaaacaaaatcagcaaagaaaattagcaagggcagaggcccatggggcgatgtcccgaggacaccaggcttgagcttccagaatcctctcccagcggggtcgtgcaggacgcacttaactccccgcacagtgagccgtgacagcgcgtgtgcagtgtcgtcgccaggaaagcacactagagactcggtgccagggtttttactgggggctgggcacatgggcaccctctgcctgcctcgtgcccagactctggactcccggagggaaggcaagttctcagcaccaaccctggtgcccacacaagcagctgagcacagggagcccctcctcagtgaggatggtgggcaccgtcccaacaccagccaggggccagccttgcacacaggcctctcaggatggtctccggcctgctgtgtagtctcttctgcacacaagcgtgagggcagcgcccccgcctcggctgtggggaggagccactgggacgtgagctctggtggcatgcagcagcttttgtctgtgtgtgcctaggacaaggccgtggcggagcctgtcagccgcctgctggagagcacgctcaggagcagccacctgcccagcagggttggagccctgcacggcgtcctctatgtgctggagtgcgacctgctggacgacactgccaagcagctcatcccggtcatcagcgactatctcctctccaacctgaaagggatcgcccagtgagtgggagcctggctggggctggggcgggggtctcagaatgagctgtgaaggaagcagcatcaccctctccaagtgcccaggctcctggccagatggcaggccaggtatcagtgggaacccaggtgggtgccatggctgaggtcagtgagacgcaagagcacaggtgcgtcctagaggcttcctcgggcacctccagcgagctggagctctcgcctctgctgctgtctcatgtggcgcttagcacactctcccacgtgcccattcctgactctgctctcgaggccatcggctctcattctctgctcccagaaccctgttattacccaggctagcctcctctctgcaccttccccgccctggcccagtacctccctcttgtttccactgtgattccgacctcaccttatcttaaagctgctggacggcaggttctgtacacacgtgtccttgacaaagcacggctggtgccgcaacccctcagcgagcaagtcaagctcttcacagcgatgtcttacaagcgcagagggctctgtgacaccctggtctcaccgccactcttccaaagtcgcagaggctttagcagagatgggcccagcctctctgagtcataggcttctgcacacgggagctgtctttagagggagggtggaatttcatcagccacccacatgggggagttgagggcaagaattaggagcaaagatgggaaggggtctgggaggaatggccagtgatcccctttgacaagtgggcaggaaacgggggctaggtcaaagttgagtggaagacctggagggagacgggaaggtctctgtaggcacagttcagacaggagggaggtgtgagccagggcacatgccggtggccgtctggcaggatttgggacatgctggagcagggacagcggctcatcaggggccattgccctcatccaggccagagtgtcacaagcccgtggggaggcccttctcgcctgtcatccttgctgggcagtgggtgctgtgctagcaggacaggcggacggctggcaactgtctctgcatccctggagcctggcatagggccaagtcacacggggcacaggcctgcaaatcaggcacatatgttggtgcagtgacgtgattttggggggcagccccagaacaggccccagacacaggccaaagccctgcctgtgctggtgtgttgggctgttctatggctcttgctgtgggcatggaggactcagggaaggagagttgaggtggtccaggagttgcgtttgggatgcagagagcttgtggcatccaggtagaaatggtgcgtggggctgacctcagcaccatgggcagaggggccgtgtcacgtgcctccgaggtggaggtgggaccacgtggtgacagatatacgcatcactgggcacgtttttgtgggtgttggggggcatcgtattggctcctctgttcacagtggccactcattcagtccctggctaccaggtcctcactgtgccatggggaaggccggcgctgtcgggggatcacagaaggcagcacgtcatgatggcatgtgccatgaaggaaaagcacagggcactcaggaagtagaggggactggcctggggtgtgggaatctagggcctcgttgagggacagagagaggaagtgtgtggtggccagcatggaggtggccacaggggaggctgagttaggccgagagggcagggcgttggggaggtagacgggctcagccactcagggagtggtcaagcagaggctgaagggtcaggccaggttgcaggggcctgggggagccactcagggtaggcgctcccgggagcccgcctggcccatagctctacactcccgcgtggggccggacatgctgtgaagccctctccacgttggatgggggtggctgagcctggatgctgtctcccgttttcagctgcgtgaacattcacagccagcagcacgtactggtcatgtgtgccactgcgttttacctcattgagaactatcctctggacgtagggccggaattttcagcatcaataatacaggtgagtgggccctggctgtcttcctctgcacacggggagtgggcttcccttctcttttccttgcaggatcataccagtgggccagttttgacttggtcgggaggaggcatgaacacctgagactgtgcagcgattctttgacacagaggcctttctccctgtgcagatgtgtggggtgatgctgtctggaagtgaggagtccaccccctccatcatttaccactgtgccctcagaggcctggagcgcctcctgctctctgagcagctctcccgcctggatgcagaatcgctggtcaagctgagtgtggacagagtgaacgtgcacagcccgcaccgggccatggcggctctgggcctgatgctcacctgcatgtacacaggtgagcatgtacacggtgcccataaggccagcccaagtcctgttcaagggaggcaggagcatgctcactcaagggacctcgactaggtgccctctgatttcacacttctggtgttgccccaagccggccccatcaccttgcaagaaaggctctggagcccccagggctggagtacctggtcagggttgaccgtccctgtggtcactcatcccatgtggctgagctgggctgggtcctgggcaagcaaggggctgatatcacctgctttcagatctccagggactcactggacccctgtgtacaaagcactgtctacagagcctattgggttgtatagaggtaaccttcgtactgaacacttttgttacaggaaaggagaaagtcagtccgggtagaacttcagaccctaatcctgcagcccccgacagcgagtcagtgattgttgctatggagcgggtatctgttctttttgataggtaagaagcgaagccccatccctcagccgttagcttccctagaactttggcctgaagctgtgcttttgtgtgtgtctgctgatcccctggcgctgttgctggagtcctgccagtgattccccaccacagcctgaccatgggctgccttggctcagggttccactggcgagctggtggtccttggaccccagcactcaggtgtagcgttgaccagttccaaggttgtcccagtgcctgcccatctctcctgagggctcagggacagtacctggcagttgggggtgtggcagggggcaggaatgaccagcctctgggagggtggggcagaagcctgtacagtgaggaggagctggctcagcctggctgcctatcgtgagaggggagcccacggggctgtgggaggggggccgtggtgcctgtgagcagggtgaggagcagcggcaggaggatgaaggtggaacccacacatgcatctttgagacccgtgtggtcagtggcttctgccccccaccaccccccactgctgtgcgtgcatagaattggcttccctcacctgctctggaagtgggttaggagcttggtagggctttttctcaaggacaagggcccctgatttgctctcaggcctcagtcctggcgacatggtggatctggagccttgttgcactgccttgcctgtgctctccaatcagggtggccagtggggagccatttggcttttctcaagagcatactcaggtggaccttgctccactgtttgaccagatgaggcattctgaacagccaagcctgtgctggtctgttttcatgttgatttttttttttcttttctttttgagatggagtttttcccttgtcacccaggctggagtgcaatggtgtgatctcggctcactgcaacctccgcctcccgggttcaagtgattctcctgcctcagcctccctagtagctgggattacaggcacacaccaccatgcccagctaatttttgtgtttttagtagagacggggtttcaccgtgttggctgggctggtctcgaactcctgaactcaagtgatccaccctccttggcctcccaaagtgctgggattgcaggcgtgagccactgcgcccggcccccatgtcgatttttaaatgcacctctgcatcgttcttcagtccccatatgctcactgagcaccactgcgactggcagacgggcacagggaggcgccacgaccagtcctggccttcaaggggcttgtggtctagtgggcccaatgctaggtggcgagtgctccaaagagtgtggtgcacgccttccgcttgaccgctctccagacgccacagggaggcacctcgcagctgaccacagatttctctctgtggagcagtgtcttcagagcggctgccatgccactgctgggcgagggtctgcgggcgggtagagccaggagcacctgtgaggaagtgcactgccattttcgtagctgcttcccgtgtgtctcagttacacacggctggcatgtgtgcactgatgagacgggaacgtgatggttgcttttcagcactgaaagggatactgctcagggggcgtgtttcaggatctggttagggaagaagcagcgagagcacagatggggccctgtgtggtaacaagaaaaaagtcctggttgacaacagtgccacgaagcgttagaacacatagggatgtttgtggagcatttgcatgtggaaagcagcaaaaacataatgggaacgggttcttttgttatgatttttaaaaatctcttttgtaacatccttcccgctgcgccgtttctgcatattcctttatgtagctttcaaactcctcttaggagttctggtccctacagggcgtgggagcccaggctttacgtagctttcaaactcctcttaggagttctggtccctacagggtgtgggagcccagggcctgtgccgagcagcctgcctccacgagctagacagaggaagggctggggttttgcctttttagtctcaaaattcgtactccagttgcttaggctctgactttccccacttggaaagtccctcacggccgagggtccctcccagccctgatttcacatcggcattttccccagtattagagccaaggccctccgcgggcaggtggggcagctgtgggagctggtgccagtctctgacctgcgtccctcctcccaggatcaggaaaggctttccttgtgaagccagagtggtggccaggatcctgccccagtttctagacgacttcttcccaccccaggacatcatgaacaaagtcatcggagagtttctgtccaaccagcagccatacccccagttcatggccaccgtggtgtataaggtgaggttgcatgtgggatggggatggagtgggaaagcctggaggtggagttgcctccgacttcccagcagattcgccagcagagcccagctcctccgctttaaagcagcaatgcctctggcccccaccccacccccgccacccaggcgcagcaggtgcttcccgtccccccagccctgacactcaggcacctgcttgctccttgcaggtgtttcagactctgcacagcaccgggcagtcgtccatggtccgggactgggtcatgctgtccctctccaacttcacgcagagggccccggtcgccatggccacgtggagcctctcctgcttctttgtcagcgcgtccaccagcccgtgggtcgcggcgatgtatcctctctgggtccctggtgctggccccgtttcccttgtcaacaccgaggctcatgtttcatgataaggttttgaaacctaacctttgcaaaaaccccacagatgccagggtgacaggccctcagccccagggaagtaaaatgctgacaggggtacagaaaggagcacgtccagacatttgctgaccagggcctctcagaggggccggtgtatggcaggagggtcgcagctgaggggcctttctgtggagggcctgggtgaggggagcgagggtgggcggtggtctctgcagacgtcccgcccactcgcgggctctgtgtggctgggcttctcctgacactgcttctcattagctttggtcattgtgcctcgatcgccctctcggggaaaggcttaagtaaagatccagttcccacccccagatgctggctgccaggagtttccctttccacagcccttccccaagacagaccacaagagcctccaagcagcacagttgtcctggtgctgacagcacagccttgcccggcgtgcctggcacggctctgccctcactgcattggagcagggctagtggaggccagcggaagcaccggccaccagcgctgcacaggagccaggccaggtgagtgctgccgagtgggtgccctgcctgcagggcatccagccagccaagggttgcaggaatggaggtggaggcgctgatgcagctggaggcatccaggtggcccttccggggctctgctcgctctccaggctccctggacccctttgtagactgtttcaggagaggaactcccaggtgaggacagggaggcagcattcccctcatttgccggcctttttccttaactcctgcaccagcctcccacatgtcatcagcaggatgggcaagctggagcaggtggacgtgaaccttttctgcctggtcgccacagacttctacagacaccagatagaggaggagctcgaccgcagggccttccagtctgtgcttgaggtggttgcagccccaggaagcccatatcaccggctgctgacttgtttacgaaatgtccacaaggtcaccacctgctgagcgccatggtgggagagactgtgaggcggcagctggggccggagcctttggaagtctgcgcccttgtgccctgcctccaccgagccagcttggtccctatgggcttccgcacatgccgcgggcggccaggcaacgtgcgtgtctctgccatgtggcagaagtgctctttgtggcagtggccaggcagggagtgtctgcagtcctggtggggctgagcctgaggccttccagaaagcaggagcagctgtgctgcaccccatgtgggtgaccaggtcctttctcctgatagtcacctgctggttgttgccaggttgcagctgctcttgcatctgggccagaagtcctccctcctgcaggctggctgttggcccctctgctgtcctgcagtagaaggtgccgtgagcaggctttgggaacactggcctgggtctccctggtggggtgtgcatgccacgccccgtgtctggatgcacagatgccatggcctgtgctgggccagtggctgggggtgctagacacccggcaccattctcccttctctcttttcttctcaggatttaaaatttaattatatcagtaaagagattaattttaacgtaactctttctatgcccgtgtaaagtatgtgaatcgcaaggcctgtgctgcatgcgacagcgtccggggtggtggacagggcccccggccacgctccctctcctgtagccactggcatagccctcctgagcacccgctgacatttccgttgtacatgttcctgtttatgcattcacaaggtgactgggatgtagagaggcgttagtgggcaggtggccacagcaggactgaggacaggcccccattatcctaggggtgcgctcacctgcagcccctcctcctcgggcacagacgactgtcgttctccacccaccagtcagggacagcagcctccctgtcactcagctgagaaggccagccctccctggctgtgagcagcctccactgtgtccagagacatgggcctcccactcctgttccttgctagccctggggtggcgtctgcctaggagctggctggcaggtgttgggacctgctgctccatggatgcatgccctaagagtgtcactgagctgtgttttgtctgagcctctctcggtcaacagcaaagcttggtgtcttggcactgttagtgacagagcccagcatcccttctgcccccgttccagctgacatcttgcacggtgaccccttttagtcaggagagtgcagatctgtgctcatcggagactgccccacggccctgtcagagccgccactcctatccccaggccaggtccctggaccagcctcctgtttgcaggcccagaggagccaagtcattaaaatggaagtggattctggatggccgggctgctgctgatgtaggagctggatttgggagctctgcttgccgactggctgtgagacgaggcaggggctctgcttcctcagccctagaggcgagccaggcaaggttggcgactgtcatgtggcttggtttggtcatgcccgtcgatgttttgggtattgaatgtggtaagtggaggaaatgttggaactctgtgcaggtgctgccttgagacccccaagcttccacctgtccctctcctatgtggcagctggggagcagctgagatgtggacttgtatgctgcccacatacgtgagggggagctgaaagggagcccctcctctgagcagcctctgccaggcctgtatgaggcttttcccaccagctcccaacagaggcctcccccagccaggaccacctcgtcctcgtggcggggcagcaggagcggtagaaaggggtccgatgtttgaggaggcccttaagggaagctactgaattataacacgtaagaaaatcaccattccgtattggttgggggctcctgtttctcatcctagctttttcctggaaagcccgctagaaggtttgggaacgaggggaaagttctcagaactgttggctgctccccacccgcctcccgcctcccccgcaggttatgtcagcagctctgagacagcagtatcacaggccagatgttgttcctggctagatgtttacatttgtaagaaataacactgtgaatgtaaaacagagccattcccttggaatgcatatcgctgggctcaacatagagtttgtcttcctcttgtttacgacgtgatctaaaccagtccttagcaaggggctcagaacaccccgctctggcagtaggtgtcccccacccccaaagacctgcctgtgtgctccggagatgaatatgagctcattagtaaaaatgacttcacccacgcatatacataaagtatccatgcatgtgcatatagacacatctataattttacacacacacctctcaagacggagatgcatggcctctaagagtgcccgtgtcggttcttcctggaagttgactttccttagacccgccaggtcaagttagccgcgtgacggacatccaggcgtgggacgtggtcagggcagggctcattcattgcccactaggatcccactggcgaagatggtctccatatcagctctctgcagaagggaggaagactttatcatgttcctaaaaatctgtggcaagcacccatcgtattatccaaattttgttgcaaatgtgattaatttggttgtcaagttttgggggtgggctgtggggagattgcttttgttttcctgctggtaatatcgggaaagattttaatgaaaccagggtagaattgtttggcaatgcactgaagcgtgtttctttcccaaaatgtgcctcccttccgctgcgggcccagctgagtctatgtaggtgatgtttccagctgccaagtgctctttgttactgtccaccctcatttctgccagcgcatgtgtcctttcaaggggaaaatgtgaagctgaaccccctccagacacccagaatgtagcatctgagaaggccctgtgccctaaaggacacccctcgcccccatcttcatggagggggtcatttcagagccctcggagccaatgaacagctcctcctcttggagctgagatgagccccacgtggagctcgggacggatagtagacagcaataactcggtgtgtggccgcctggcaggtggaacttcctcccgttgcggggtggagtgaggttagttctgtgtgtctggtgggtggagtcaggcttctcttgctacctgtgagcatccttcccagcagacatcctcatcgggctttgtccctcccccgcttcctccctctgcggggaggacccgggaccacagctgctggccagggtagacttggagctgtcctccagaggggtcacgtgtaggagtgagaagaaggaagatcttgagagctgctgagggaccttggagagctcaggatggctcagacgaggacactcgcttgccgggcctgggcctcctgggaaggagggagctgctcagaatgccgcatgacaactgaaggcaacctggaaggttcaggggccgctcttcccccatgtgcctgtcacgctctggtgcagtcaaaggaacgccttcccctcagttgtttctaagagcagagtctcccgctgcaatctgggtggtaactgccagccttggaggatcgtggccaacgtggacctgcctacggagggtgggctctgacccaagtggggcctccttgtccaggtctcactgctttgcaccgtggtcagagggactgtcagctgagcttgagctcccctggagccagcagggctgtgatgggcgagtcccggagccccacccagacctgaatgcttctgagagcaaagggaaggactgacgagagatgtatatttaattttttaactgctgcaaacattgtacatccaaattaaaggaaaaaaatggaaaccatcagttgttgctgtgtgaggcttgctttgcttcatgagaacctagaccttgctgagctggagtcttaggaagcagtctcctaagtgcttctccagcaggggcagaaactgtcccaccagctaacatctggcattatggagggtcccccaggcagctgccagcagggacaggccccgtgttttctgtagccagggatgaggaagtggccccagggcatgggcctggctgggtgcttctgcaagggccttcccaaaccacagtacaggtggtcttcctgccctgcagatgggagctgtgggagctgctggagctgctggagccttcatggtcaagtgacatcataagcttatatgacatacacaagcctcaggacttggcccatggcactgaagcaggtcatcaggcccagcacagagactagagctgtgttctcacagggcccaccacccttccacctccttggccattgacacctgcgtccctggcccagctgctcccaggtaacccccaaagcagctggcacatcccacctctggtgtggccggggctgctgtgtgtccgcagggcctgccccgtctattctagcttgtttgtcctgtctgaaccagcgcctactccaagaagcctctgctcagcccagcggggatgcttctaagctccggacgagcctctcggaagccttggtgattggtggtgtagtcatcttgggatgcagatgtcttaccaacctgcaagaacaaaaaccctgtggcttcctctggtgcagggtatttagtcaatgtttgctgaggtcccgtctggttctggctaattggcaggggtcgtccacccattctttccctgctctgctgtctgtgccaggagagacgggggccagtcggccaaggggccagctcctgctgcctgctcctcttgggcacgtgcgggggccccctttctctgagcagggatagggatcagtctgccggagggatgtggtggacaggcctaaagcatttggggcggggcatgccacttgagctccctaaatctgtctcctcataggtgacaccgctccagggccccccagtggcctctcctttcagagctacctaaattctggtcacttcagagaaatggagcacccccttctccctggtccaggtgtggacagcctggcacactgagcacacctggcatggctggtaatttcagaaagaagaggggccggggtccagtgggaagcagcggtgaacccctcgtgagtgggctttgcagtccctccccatgccacggcagagctgccctcaacacagccttcctcttcctcatcggagagcacaccctgtccccttgccgagctgtgccctgtgccttcggtggtatttgattttggctgctactggctttgttgggatctggaagtcgcttcccctgcgtggtgcgtggagcactgtaagtcagatgagggaagtagccagggtgaggtgagtaccgggtggagccgccactgaagggactgggtaggggggccttgcctctacatgatgtgacacagccaaccgaggacagaggaagccccgttcctgggggtgtggggtgcacccctcagggaagcctgcagtggggcctgaggaaaggcatcctccgcgagcccacgagtctggtccatgagcaccgtgacagtgtctgtgggtagaggtggacccggccttgtgtcatcaccaggacctcttttgggaaaccatgtggacatcgcttgcgggtcccccaggctctgcagccccagcagcctggctgccttttgggcaagtggcttgagccacagaggacccagtcctgttgcagccacatcctctgggggggcccgccagtgtggccggctttctccaccctacaccaggcctccaggtgtcctggtcgggggtgtctgggccctgggtgggccctgtggacctgtgaggtcagggtcagggcatcactggaggcagagggctgaagttgtgggtctgggttccccttgt

SEQ ID NO: 12 - DNA, 176286 bp, Homo sapiens
  source 1..176286: mol_type = genomic DNA
acaaggggaacccagacccacaacttcagccctctgcctccagtgatgccctgaccctgacctcacaggtccacagggcccacccagggcccagacacccccgaccaggacacctggaggcctggtgtagggtggagaaagccggccacactggcgggcccccccagaggatgtggctgcaacaggactgggtcctctgtggctcaagccacttgcccaaaaggcagccaggctgctggggctgcagagcctgggggacccgcaagcgatgtccacatggtttcccaaaagaggtcctggtgatgacacaaggccgggtccacctctacccacagacactgtcacggtgctcatggaccagactcgtgggctcgcggaggatgcctttcctcaggccccactgcaggcttccctgaggggtgcaccccacacccccaggaacggggcttcctctgtcctcggttggctgtgtcacatcatgtagaggcaaggcccccctacccagtcccttcagtggcggctccacccggtactcacctcaccctggctacttccctcatctgacttacagtgctccacgcaccacgcaggggaagcgacttccagatcccaacaaagccagtagcagccaaaatcaaataccaccgaaggcacagggcacagctcggcaaggggacagggtgtgctctccgatgaggaagaggaaggctgtgttgagggcagctctgccgtggcatggggagggactgcaaagcccactcacgaggggttcaccgctgcttcccactggaccccggcccctcttctttctgaaattaccagccatgccaggtgtgctcagtgtgccaggctgtccacacctggaccagggagaagggggtgctccatttctctgaagtgaccagaatttaggtagctctgaaaggagaggccactggggggccctggagcggtgtcacctatgaggagacagatttagggagctcaagtggcatgccccgccccaaatgctttaggcctgtccaccacatccctccggcagactgatccctatccctgctcagagaaagggggcccccgcacgtgcccaagaggagcaggcagcaggagctggccccttggccgactggcccccgtctctcctggcacagacagcagagcagggaaagaatgggtggacgacccctgccaattagccagaaccagacgggacctcagcaaacattgactaaataccctgcaccagaggaagccacagggtttttgttcttgcaggttggtaagacatctgcatcccaagatgactacaccaccaatcaccaaggcttccgagaggctcgtccggagcttagaagcatccccgctgggctgagcagaggcttcttggagtaggcgctggttcagacaggacaaacaagctagaatagacggggcaggccctgcggacacacagcagccccggccacaccagaggtgggatgtgccagctgctttgggggttacctgggagcagctgggccagggacgcaggtgtcaatggccaaggaggtggaagggtggtgggccctgtgagaacacagctctagtctctgtgctgggcctgatgacctgcttcagtgccatgggccaagtcctgaggcttgtgtatgtcatataagcttatgatgtcacttgaccatgaaggctccagcagctccagcagctcccacagctcccatctgcagggcaggaagaccacctgtactgtggtttgggaaggcccttgcagaagcacccagccaggcccatgccctggggccacttcctcatccctggctacagaaaacacggggcctgtccctgctggcagctgcctgggggaccctccataatgccagatgttagctggtgggacagtttctgcccctgctggagaagcacttaggagactgcttcctaagactccagctcagcaaggtctaggttctcatgaagcaaagcaagcctcacacagcaacaactgatggtttccatttttttcctttaatttggatgtacaatgtttgcagcagttaaaaaattaaatatacatctctcgtcagtccttccctttgctctcagaagcattcaggtctgggtggggctccgggactcgcccatcacagccctgctggctccaggggagctcaagctcagctgacagtccctctgaccacggtgcaaagcagtgagacctggacaaggaggccccacttgggtcagagcccaccctccgtaggcaggtccacgttggccacgatcctccaaggctggcagttaccacccagattgcagcgggagactctgctcttagaaacaactgaggggaaggcgttcctttgactgcaccagagcgtgacaggcacatgggggaagagcggcccctgaaccttccaggttgccttcagttgtcatgcggcattctgagcagctccctccttcccaggaggcccaggcccggcaagcgagtgtcctcgtctgagccatcctgagctctccaaggtccctcagcagctctcaagatcttccttcttctcactcctacacgtgacccctctggaggacagctccaagtctaccctggccagcagctgtggtcccgggtcctccccgcagagggaggaagcgggggagggacaaagcccgatgaggatgtctgctgggaaggatgctcacaggtagcaagagaagcctgactccacccaccagacacacagaactaacctcactccaccccgcaacgggaggaagttccacctgccaggcggccacacaccgagttattgctgtctactatccgtcccgagctccacgtggggctcatctcagctccaagaggaggagctgttcattggctccgagggctctgaaatgaccccctccatgaagatgggggcgaggggtgtcctttagggcacagggccttctcagatgctacattctgggtgtctggagggggttcagcttcacattttccccttgaaaggacacatgcgctggcagaaatgagggtggacagtaacaaagagcacttggcagctggaaacatcacctacatagactcagctgggcccgcagcggaagggaggcacattttgggaaagaaacacgcttcagtgcattgccaaacaattctaccctggtttcattaaaatctttcccgatattaccagcaggaaaacaaaagcaatctccccacagcccacccccaaaacttgacaaccaaattaatcacatttgcaacaaaatttggataatacgatgggtgcttgccacagatttttaggaacatgataaagtcttcctcccttctgcagagagctgatatggagaccatcttcgccagtgggatcctagtgggcaatgaatgagccctgccctgaccacgtcccacgcctggatgtccgtcacgcggctaacttgacctggcgggtctaaggaaagtcaacttccaggaagaaccgacacgggcactcttagaggccatgcatctccgtcttgagaggtgtgtgtgtaaaattatagatgtgtctatatgcacatgcatggatactttatgtatatgcgtgggtgaagtcatttttactaatgagctcatattcatctccggagcacacaggcaggtctttgggggtgggggacacctactgccagagcggggtgttctgagccccttgctaaggactggtttagatcacgtcgtaaacaagaggaagacaaactctatgttgagcccagcgatatgcattccaagggaatggctctgttttacattcacagtgttatttcttacaaatgtaaacatctagccaggaacaacatctggcctgtgatactgctgtctcagagctgctgacataacctgcgggggaggcgggaggcgggtggggagcagccaacagttctgagaactttcccctcgttcccaaaccttctagcgggctttccaggaaaaagctaggatgagaaacaggagcccccaaccaatacggaatggtgattttcttacgtgttataattcagtagcttcccttaagggcctcctcaaacatcggacccctttctaccgctcctgctgccccgccacgaggacgaggtggtcctggctgggggaggcctctgttgggagctggtgggaaaagcctcatacaggcctggcagaggctgctcagaggaggggctccctttcagctccccctcacgtatgtgggcagcatacaagtccacatctcagctgctccccagctgccacataggagagggacaggtggaagcttgggggtctcaaggcagcacctgcacagagttccaacatttcctccacttaccacattcaatacccaaaacatcgacgggcatgaccaaaccaagccacatgacagtcgccaaccttgcctggctcgcctctagggctgaggaagcagagcccctgcctcgtctcacagccagtcggcaagcagagctcccaaatccagctcctacatcagcagcagcccggccatccagaatccacttccattttaatgacttggctcctctgggcctgcaaacaggaggctggtccagggacctggcctggggataggagtggcggctctgacagggccgtggggcagtctccgatgagcacagatctgcactctcctgactaaaaggggtcaccgtgcaagatgtcagctggaacgggggcagaagggatgctgggctctgtcactaacagtgccaagacaccaagctttgctgttgaccgagagaggctcagacaaaacacagctcagtgacactcttagggcatgcatccatggagcagcaggtcccaacacctgccagccagctcctaggcagacgccaccccagggctagcaaggaacaggagtgggaggcccatgtctctggacacagtggaggctgctcacagccagggagggctggccttctcagctgagtgacagggaggctgctgtccctgactggtgggtggagaacgacagtcgtctgtgcccgaggaggaggggctgcaggtgagcgcacccctaggataatgggggcctgtcctcagtcctgctgtggccacctgcccactaacgcctctctacatcccagtcaccttgtgaatgcataaacaggaacatgtacaacggaaatgtcagcgggtgctcaggagggctatgccagtggctacaggagagggagcgtggccgggggccctgtccaccaccccggacgctgtcgcatgcagcacaggccttgcgattcacatactttacacgggcatagaaagagttacgttaaaattaatctctttactgatataattaaattttaaatcctgagaagaaaagagagaagggagaatggtgccgggtgtctagcacccccagccactggcccagcacaggccatggcatctgtgcatccagacacggggcgtggcatgcacaccccaccagggagacccaggccagtgttcccaaagcctgctcacggcaccttctactgcaggacagcagaggggccaacagccagcctgcaggagggaggacttctggcccagatgcaagagcagctgcaacctggcaacaaccagcaggtgactatcaggagaaaggacctggtcacccacatggggtgcagcacagctgctcctgctttctggaaggcctcaggctcagccccaccaggactgcagacactccctgcctggccactgccacaaagagcacttctgccacatggcagagacacgcacgttgcctggccgcccgcggcatgtgcggaagcccatagggaccaagctggctcggtggaggcagggcacaagggcgcagacttccaaaggctccggccccagctgccgcctcacagtctctcccaccatggcgctcagcaggtggtgaccttgtggacatttcgtaaacaagtcagcagccggtgatatgggcttcctggggctgcaaccacctcaagcacagactggaaggccctgcggtcgagctcctcctctatctggtgtctgtagaagtctgtggcgaccaggcagaaaaggttcacgtccacctgctccagcttgcccatcctgctgatgacatgtgggaggctggtgcaggagttaaggaaaaaggccggcaaatgaggggaatgctgcctccctgtcctcacctgggagttcctctcctgaaacagtctacaaaggggtccagggagcctggagagcgagcagagccccggaagggccacctggatgcctccagctgcatcagcgcctccacctccattcctgcaacccttggctggctggatgccctgcaggcagggcacccactcggcagcactcacctggcctggctcctgtgcagcgctggtggccggtgcttccgctggcctccactagccctgctccaatgcagtgagggcagagccgtgccaggcacgccgggcaaggctgtgctgtcagcaccaggacaactgtgctgcttggaggctcttgtggtctgtcttggggaagggctgtggaaagggaaactcctggcagccagcatctgggggtgggaactggatctttacttaagcctttccccgagagggcgatcgaggcacaatgaccaaagctaatgagaagcagtgtcaggagaagcccagccacacagagcccgcgagtgggcgggacgtctgcagagaccaccgcccaccctcgctcccctcacccaggccctccacagaaaggcccctcagctgcgaccctcctgccatacaccggcccctctgagaggccctggtcagcaaatgtctggacgtgctcctttctgtacccctgtcagcattttacttccctggggctgagggcctgtcaccctggcatctgtggggtttttgcaaaggttaggtttcaaaaccttatcatgaaacatgagcctcggtgttgacaagggaaacggggccagcaccagggacccagagaggatacatcgccgcgacccacgggctggtggacgcgctgacaaagaagcaggagaggctccacgtggccatggcgaccggggccctctgcgtgaagttggagagggacagcatgacccagtcccggaccatggacgactgcccggtgctgtgcagagtctgaaacacctgcaaggagcaagcaggtgcctgagtgtcagggctggggggacgggaagcacctgctgcgcctgggtggcgggggtggggtgggggccagaggcattgctgctttaaagcggaggagctgggctctgctggcgaatctgctgggaagtcggaggcaactccacctccaggctttcccactccatccccatcccacatgcaacctcaccttatacaccacggtggccatgaactgggggtatggctgctggttggacagaaactctccgatgactttgttcatgatgtcctggggtgggaagaagtcgtctagaaactggggcaggatcctggccaccactctggcttcacaaggaaagcctttcctgatcctgggaggagggacgcaggtcagagactggcaccagctcccacagctgccccacctgcccgcggagggccttggctctaatactggggaaaatgccgatgtgaaatcagggctgggagggaccctcggccgtgagggactttccaagtggggaaagtcagagcctaagcaactggagtacgaattttgagactaaaaaggcaaaaccccagcccttcctctgtctagctcgtggaggcaggctgctcggcacaggccctgggctcccacaccctgtagggaccagaactcctaagaggagtttgaaagctacgtaaagcctgggctcccacgccctgtagggaccagaactcctaagaggagtttgaaagctacataaaggaatatgcagaaacggcgcagcgggaaggatgttacaaaagagatttttaaaaatcataacaaaagaacccgttcccattatgtttttgctgctttccacatgcaaatgctccacaaacatccctatgtgttctaacgcttcgtggcactgttgtcaaccaggacttttttcttgttaccacacagggccccatctgtgctctcgctgcttcttccctaaccagatcctgaaacacgccccctgagcagtatccctttcagtgctgaaaagcaaccatcacgttcccgtctcatcagtgcacacatgccagccgtgtgtaactgagacacacgggaagcagctacgaaaatggcagtgcacttcctcacaggtgctcctggctctacccgcccgcagaccctcgcccagcagtggcatggcagccgctctgaagacactgctccacagagagaaatctgtggtcagctgcgaggtgcctccctgtggcgtctggagagcggtcaagcggaaggcgtgcaccacactctttggagcactcgccacctagcattgggcccactagaccacaagccccttgaaggccaggactggtcgtggcgcctccctgtgcccgtctgccagtcgcagtggtgctcagtgagcatatggggactgaagaacgatgcagaggtgcatttaaaaatcgacatgggggccgggcgcagtggctcacgcctgcaatcccagcactttgggaggccaaggagggtggatcacttgagttcaggagttcgagaccagcccagccaacacggtgaaaccccgtctctactaaaaacacaaaaattagctgggcatggtggtgtgtgcctgtaatcccagctactagggaggctgaggcaggagaatcacttgaacccgggaggcggaggttgcagtgagccgagatcacaccattgcactccagcctgggtgacaagggaaaaactccatctcaaaaagaaaagaaaaaaaaaaatcaacatgaaaacagaccagcacaggcttggctgttcagaatgcctcatctggtcaaacagtggagcaaggtccacctgagtatgctcttgagaaaagccaaatggctccccactggccaccctgattggagagcacaggcaaggcagtgcaacaaggctccagatccaccatgtcgccaggactgaggcctgagagcaaatcaggggcccttgtccttgagaaaaagccctaccaagctcctaacccacttccagagcaggtgagggaagccaattctatgcacgcacagcagtggggggtggtggggggcagaagccactgaccacacgggtctcaaagatgcatgtgtgggttccaccttcatcctcctgccgctgctcctcaccctgctcacaggcaccacggcccccctcccacagccccgtgggctcccctctcacgataggcagccaggctgagccagctcctcctcactgtacaggcttctgccccaccctcccagaggctggtcattcctgccccctgccacacccccaactgccaggtactgtccctgagccctcaggagagatgggcaggcactgggacaaccttggaactggtcaacgctacacctgagtgctggggtccaaggaccaccagctcgccagtggaaccctgagccaaggcagcccatggtcaggctgtggtggggaatcactggcaggactccagcaacagcgccaggggatcagcagacacacacaaaagcacagcttcaggccaaagttctagggaagctaacggctgagggatggggcttcgcttcttacctatcaaaaagaacagatacccgctccatagcaacaatcactgactcgctgtcgggggctgcaggattagggtctgaagttctacccggactgactttctcctttcctgtaacaaaagtgttcagtacgaaggttacctctatacaacccaataggctctgtagacagtgctttgtacacaggggtccagtgagtccctggagatctgaaagcaggtgatatcagccccttgcttgcccaggacccagcccagctcagccacatgggatgagtgaccacagggacggtcaaccctgaccaggtactccagccctgggggctccagagcctttcttgcaaggtgatggggccggcttggggcaacaccagaagtgtgaaatcagagggcacctagtcgaggtcccttgagtgagcatgctcctgcctcccttgaacaggacttgggctggccttatgggcaccgtgtacatgctcacctgtgtacatgcaggtgagcatcaggcccagagccgccatggcccggtgcgggctgtgcacgttcactctgtccacactcagcttgaccagcgattctgcatccaggcgggagagctgctcagagagcaggaggcgctccaggcctctgagggcacagtggtaaatgatggagggggtggactcctcacttccagacagcatcaccccacacatctgcacagggagaaaggcctctgtgtcaaagaatcgctgcacagtctcaggtgttcatgcctcctcccgaccaagtcaaaactggcccactggtatgatcctgcaaggaaaagagaagggaagcccactccccgtgtgcagaggaagacagccagggcccactcacctgtattattgatgctgaaaattccggccctacgtccagaggatagttctcaatgaggtaaaacgcagtggcacacatgaccagtacgtgctgctggctgtgaatgttcacgcagctgaaaacgggagacagcatccaggctcagccacccccatccaacgtggagagggcttcacagcatgtccggccccacgcgggagtgtagagctatgggccaggcgggctcccgggagcgcctaccctgagtggctcccccaggcccctgcaacctggcctgacccttcagcctctgcttgaccactccctgagtggctgagcccgtctacctccccaacgccctgccctctcggcctaactcagcctcccctgtggccacctccatgctggccaccacacacttcctctctctgtccctcaacgaggccctagattcccacaccccaggccagtcccctctacttcctgagtgccctgtgcttttccttcatggcacatgccatcatgacgtgctgccttctgtgatcccccgacagcgccggccttccccatggcacagtgaggacctggtagccagggactgaatgagtggccactgtgaacagaggagccaatacgatgccccccaacacccacaaaaacgtgcccagtgatgcgtatatctgtcaccacgtggtcccacctccacctcggaggcacgtgacacggcccctctgcccatggtgctgaggtcagccccacgcaccatttctacctggatgccacaagctctctgcatcccaaacgcaactcctggaccacctcaactctccttccctgagtcctccatgcccacagcaagagccatagaacagcccaacacaccagcacaggcagggctttggcctgtgtctggggcctgttctggggctgccccccaaaatcacgtcactgcaccaacatatgtgcctgatttgcaggcctgtgccccgtgtgacttggccctatgccaggctccagggatgcagagacagttgccagccgtccgcctgtcctgctagcacagcacccactgcccagcaaggatgacaggcgagaagggcctccccacgggcttgtgacactctggcctggatgagggcaatggcccctgatgagccgctgtccctgctccagcatgtcccaaatcctgccagacggccaccggcatgtgccctggctcacacctccctcctgtctgaactgtgcctacagagaccttcccgtctccctccaggtcttccactcaactttgacctagcccccgtttcctgcccacttgtcaaaggggatcactggccattcctcccagaccccttcccatctttgctcctaattcttgccctcaactcccccatgtgggtggctgatgaaattccaccctccctctaaagacagctcccgtgtgcagaagcctatgactcagagaggctgggcccatctctgctaaagcctctgcgactttggaagagtggcggtgagaccagggtgtcacagagccctctgcgcttgtaagacatcgctgtgaagagcttgacttgctcgctgaggggttgcggcaccagccgtgctttgtcaaggacacgtgtgtacagaacctgccgtccagcagctttaagataaggtgaggtcggaatcacagtggaaacaagagggaggtactgggccagggcggggaaggtgcagagaggaggctagcctgggtaataacagggttctgggagcagagaatgagagccgatggcctcgagagcagagtcaggaatgggcacgtgggagagtgtgctaagcgccacatgagacagcagcagaggcgagagctccagctcgctggaggtgcccgaggaagcctctaggacgcacctgtgctcttgcgtctcactgacctcagccatggcacccacctgggttcccactgatacctggcctgccatctggccaggagcctgggcacttggagagggtgatgctgcttccttcacagctcattctgagacccccgccccagccccagccaggctcccactcactgggcgatccctttcaggttggagaggagatagtcgctgatgaccgggatgagctgcttggcagtgtcgtccagcaggtcgcactccagcacatagaggacgccgtgcagggctccaaccctgctgggcaggtggctgctcctgagcgtgctctccagcaggcggctgacaggctccgccacggccttgtcctaggcacacacagacaaaagctgctgcatgccaccagagctcacgtcccagtggctcctccccacagccgaggcgggggcgctgccctcacgcttgtgtgcagaagagactacacagcaggccggagaccatcctgagaggcctgtgtgcaaggctggcccctggctggtgttgggacggtgcccaccatcctcactgaggaggggctccctgtgctcagctgcttgtgtgggcaccagggttggtgctgagaacttgccttccctccgggagtccagagtctgggcacgaggcaggcagagggtgcccatgtgcccagcccccagtaaaaaccctggcaccgagtctctagtgtgctttcctggcgacgacactgcacacgcgctgtcacggctcactgtgcggggagttaagtgcgtcctgcacgaccccgctgggagaggattctggaagctcaagcctggtgtcctcgggacatcgccccatgggcctctgcccttgctaattttctttgctgattttgttttgtgtgcttttaccataacacatcttagctgagagtctttctagaaaagcctggggtagtcttggggatccctgatagtggtttctgtcaacttcaaccaaaatggcctcaatttcacttagtatccaaaacctagcagggttaaatatcgacctaaacacttagcccacgttcttcactttcaatctgctctttaacagtgaggagacccctgcagaagtcagcaaggaatgtcaccctccttcagcccaagactatggggacacagaattcccatggagcgctggatggccaggcggcctcttgtttttgtggaatgatgaggttctcggcagtggtaggagcctctccgcaggggaaatggccggacgacacagaagccactcccagccatcccaggaacaaggaccaaaagaggaggctgttctttgtgggtcacttccttcttgggcccccacctcaccctgtgctatcccctcacacgcacaacgccacacggcccctccctaaggactgcgtacggccccaggtcccacttctgaaagccccacatcaggacctgctctcgggtggcacggatttcacaacggtgggcaaatacctcaaaacgacatgctctggatacgtgggtaccaagcatgacgcgctgaaaaccttcacagaggatggccatcttccagaaagcatgagtgcacaaagagctgggagtgagtgtccatgaccatcctgccttaggatctgcttttcaaaatgattatttctcatttgattactgatggcacaacacttgcctagggggatctgggcctgagcacaaaaccacagttacaattcaagttagcccagcagctgaaacttcccacaaaggagaaggaccccttccaagagccgctttgacatcgtgtgggcaacacccagagggtgttcgccgtgaagagagatgcccacacagggaacccacacactcaattgtttccactccctggacggctgctgagtcaccagcatggcaccaggctgaaggacacccacaagggaagatgactggcgtttgggctcggggaggacagagtctaggcaagagcagtcaagactcgcagagagggagtcaggctccaggtcacggacatgtgctcacctcaacctctgctgcattttgtgtgacccagacaagccagctaacctctgaccttggccgcctagggtggggccaaggtcacccttggccttgtcaggtgggggtgcgggaggaagagctccgcaaatgttagcggctggagtgatggcaaaaaaaaaaatcattcaccgtcatgacagcattgtcgttcctgacacacaggagcccgtccagagcacgggctaggcaggccctgatgggcaccaccatgccattctcaccaagggccccagacggctggcacacggcagccactcaggtgtttgttgaagaaatgagtttccattgctatcataaaatggattactaggtaatgccacatgacaaggaaccagaggtgccagctctgacagttctgccatccttgaatatgcttcgccagatgtcgggacccacgggcaatgatttcacgtgtgcaggtgatggatacttggcaaataccatgtggtgatgtgccacagaatacaggtaccatgctgcactggctgaatcctgataaaccagaagcagaataaggaggaactcaagaggatgaacacttgaccgctgggatggtctgaatgtttctatccctcctgaaactcctacactgacacctaatttgcagtgccacagtacaagaaggtggggccttgggaggtgatgaggtcatgatgggagagcccttgtggattggggcccttctaaaaggcctgagggagcttgttcactccttccaccgtgaggacccagccagaagatgccatctatgaagcagagagcagccctcatcacacaccaaatctgctggcaccttgaccatgaaaacttccagcccccagaacggtgagaagtaaatttccactgtttataaattacccagtctaaggtaacttgtggtagcagccaaaaaagactaagacaaccaccacgctaaaaagagactatagcacccagatttgggactagaaacacagggtcactgtgacaaaacggcccccaggagagaagctgtccagccaggaagctcggggggcctggaacataactgagaaggggagtgaggcagtcaggcctcagggcagagcatggggaagccagtagcatttccaccatctacgatgcctcagcgccaccacacaccgtggttctgtggggatgggctactacaatgatgtcataagcccagggatacgggaccccaaaccatggcttggccgccacaacccacatcacagtgacctgtgaatggcactgaccgtcgctgaaccccctccatctgagaagcactgcagctcacgtgggccgtggagtccggttcgggtcaactcttggaaggaggcagccgcacccggcacctctggccaacaccaggtcccaaggcagatgggcccccgtggcttcagcacagaaacctctgtgccacctgtcacttaccatcccaaggacggcagctgccttgcaggtggcaggcaccaggtactgagcgaggatctcgtcttctgaagggtgcacccttcgcagttctgtcagcgtcacatacatcagctcaaactggttgcgctcggtgaacaagtctgagaccactagaagctggagatgtggaaaaccaggagggcaaggggagaatcgcgctgttagaatccaggcaacgcatccagaacgctactactggcaagtcgtgttcttacacccaagagacattactgtgcgggacgcatgtgtgcgtgtgtgtgtggtgtatgcgtgtgctgtgtctgtgtgggtgcgtggtacacgtggtgcatgtatggtgtgtgtatggtgtgtacatgtggcgtatgtggtgtgtgtgtgcgcatgtggtgtgtgtgcgtggtgtgcaagtggtgtgtgtgtggtgtggggtgtgtatatacatgtgtgtacatgtggcatgtgtgtggtgcatgtgtgtgtggcatgtgtgtggtgcgtacatgtgtgtggggtgtgtgcacgtggcgtgtgtgtagtgtgtgccatgtgtctggtgcatgcacatgtggcatgtgtgtggtgcatgtgtgtggttgtgtgctgtgtgtggcacatacatgtggtgtgtggggtgtgtgcacgtggcatgtgtgtgttgtgtgcatgtaacctgtgtggtgtggtgcatgtggtgtgtgtggtgtgtgtgtgtgtgtgtggtgcatgcatgtggagtgtgtgtgcatgtggcatgtgtgtggtgcatgtggtgtggcgtgtgtgtgtggcatgtgtgctgtgtgtgttgtgtgtatggtgcatgccgtgtatgtgtgtgcatgtggcatgtgtgtgtggtgtctatggtgcgtgtggcctgtgtgtgtgttgcatgcatgaggggtgtgtgtgcaagtggcatgtgtgtgggcggtgtgtgtgtgtggggtgtgtggcgtgtgtggtgcgtgtggcacgtgcaggtgtgaggggaatgggaaggctcacttacggatctgaccacctcactgatcaggatggccggggtcctcctggctgagctggacggcaggatccagcggctgtacaactcaagcaaaaactgcgaacaggagtggatgtcaactccagcccggtgtttcctgtggaatatgcgagatgggtattttccaagtacatgagatgagaggctcatttcaagaagcacctcaaacaaatcaaatgactgataagaaatttcaaatttctgttaaaaagaaaaaggccattggaaaacctggagttgactggagacgtgggtggtgacgaaggtgcaggggcgtcggcctcctcctcctcttcctcgtcccattcctcctccctcaggggtgtgatgctgttccccagccacacggagtgtatggacacctgccacagaaacggggcactgctcagtgctgcggccacagtgccaggctcctggtgggtgggtgtggccactgggactcagcacatgcctaccgtctaacagtctgccccttagcaagggtcgttcagacaccccaggttacgggcaagggagcccacagagagggtggggcaggggctggacagctgctgggaagctccagcacatgctaaaggcatgaatcaggggccagtcaaccccaggagcagctgaggagggtgacacagaaagaggctctacgaagggatgctttcactcctaagtgacatctgaatggagtccccaaaacacggaaccaatacgtgagattccttttccagtctcccgcactggcagtcattgcggtaaacccaaggccagagctccctcgcgcctttgtgacccgcgctctagatcacgcagccaccacgcagtcagcacacctcgactgtcctcctttctgcctggttctcgggaagcctcgagcacttggcacagtgctgtgggctgtgtgcccataaaaagctgttctccatcatcactggcactagccccaactcacgttcttggcaccaagggccatttcccccctgggacccagcaccctgcagggagtgggcgaggagtctgtatgaacagctctcaggccaaggaggagcccctgcactcccctcgcccagacccctaacccccacccctctttcccaaaagcaagtagcggctcagtccagtggcatctaggggctaaacatcccagacagggcaggggtggcactgtccttcagccccagacagggcaggggtggcactgtccttcagccccagacagggcaggggtggcactgtccttcagccccagacagggcaggggtggcactgtccttcagccccagacagggcaggggtggcactgtccttcagccccagacagggcaggggtggcactgtccttcagccccagacagggcaggggtggcactgtccttcagccccagacagggcaggggtggcactgtccttcagccccagacagggcaggggtggcactgtccttcagccccagacagggcaggggtggcactgtccttcagccccagacagggcaggggtggcactgtccttcagccccagacagggcaggggtggcactgtccttcagccccagacagggcaggggtggcactgtccttcagccccagacagggcaggggtggcactgtccttcagccccagacagggaaggggtggcactgtccttcagccccagacagggcaggggtggcactgtacttcagccccagacagggcaggggtggcactgtccttcagccccagacagggcaggggtggcactgtacttcagccccagacagggcaggggtgggaccgtacttcagccccagtatgatcccatgacagttggtttgcggacgctggacacaacgcaaacattgaaggatgtggccaaatgcagcggggttggggggatagggaatacctcgggcacagaccagtgtccctgggcccaggacaaggccagaggcacccagtgagccccaggcctctcactctcagcctgcccttcagaaacactttcatgaaaaatacagtgcatcctattggtcattttcacttatcttggggtggaaacatctgtcaaaggtgaaaggacagaagagtgggacttctttttccaactatgtctagaaaaatacaggctggtccagtagctccctgcttcctgtcactgaaaccggcaggcacaaaacaggacagtacaggcagagagcagggaacagaaacaggcttgtgacatcacagggtttctgctgtgaaggctgcaggccaggaactcagaagaggaaactctcagagctcataagtgtttctaaacaccatattctgacccatttccacagaaacaaaagctacaaagagaactgtcctgcacaactgctttcactaaatcaggaacccggtgagcgaaagacacagcaccggggtggagggaaaggtgcaagtcggccagcacagccgggccccgcccagcatacacctgtagggctccacgccatgtgccatcatatgcaaatggccctacgtttctgtttacatttttttttaagggacagagtactggtctgttgcccaggctggagtgcagtggtgcaatcatggctcactgcagcctcaacctcctgagctcaggtaagcctcctgcctcagcctcctaaaatgttatagattacaggtgttagccaccacacccagacccttgaatcccttcacttatctgaggaggaaacagaagcacagaccaatgtgacctgctaggaagtggccgagctgtctgcctgcacacggggctcccacccagaactggccacagggacagggacactcagggagccccccaagagctggccccagggacactcacggccacgcctgcggccccccataccatggcccttcatggcgtctacttcctcctgagcatttcagctgactccactctgtcctcacccccctttttgtgtctcacggtccttgcttaagtccaagtcacgccctctcactgtctcttacacacatctctatcgctacatgtgaggtctcttaactactttctggaatacagaacataaataaaaacaaaactaatgcttcctctgcttgcgggacctaggaataaaacagataaaaacaatgaacattaaatttttttttaaaaaaaaggaaaacttcctttcatttaaaaagtgcactgagcttttctcctgggtgtgtcaagcgccaaagtctgaggacagaaacggacagaggccaggcggcgggggcgcgagactgacctggccgagtttgtagctcatgctccccagctcccgctcggggttgatctgtagcagcagcttctcgtggctgatgagggcacctgtgaacaccagcaccctgagtcttgatctgcacaggggggcagggccgcaggcccaccccataccagcccagctcctgcccagacaggcacccagccgtgagccacctgccctcgccgccactggcaggagggcccaggttgtgcagagccctgtgggtcttggggatttgtcactttataaccagttaagctggcagggccagtgggcaagctggactctgtcactttttctctatgacaaataagactgcagcagtcacttgtcacccctcagctcccacctctgtgaataggaactggttgtgggctgagctgcaaaagcttaggagtcagcagttgcaggcgagccgacagtccaggcaggcaagctctctgggggacccagataagcattttggtgaacagtgccttccagaaccccacctcggtgcccaggctgaccagatacagccggcaggagcgggagcaggataatgcccccacttaacctttcacacccccccacgccccaggccagcctcctcatgtctttctgctgggcatccccccaattcccgggcaccagcctcccgctaaatgtccccagctaaccctctgccagaccccagatcaacttgcctcctccaaaggggcctccacgcccccttccctggaagcacttgctccccttggagctccaggagctgcctgtgtatgcctcccacccacctctgtgcccctcttttctgccttctatgacaggtcattgctcctgggtcctcctgacttatgagctccttgaaggctggatccatggccctccaagtgctcagtttacttcaacgccctaataaacatttgagtctcatagacactgcgtataacacattgcacgtccacatagaactttctgcaattaaagccttcaaggtgcttaaactcctaaatagctacggaatcacagagctctacgctaaaatacttttgagtgaaaaacgtgcatcccaaatccccacacaactctcttcttttaaaccaggtgacaagctccgatgcctgtgatagggcaggcacacaaccggaaggcttggtgggagagtgggcagtgacaggcagggcccagggaggggagaggtgcagggagcggggtgctcaggcccagctgtgccctgccctgcagccactgccacacatggtttcttaggaaaagctggagattcagcttgtgtagatgaacttggttgagttcttaacataagcaactaattcaacttttaaatcctgctggtcttacagcccgtgagaattctttcgcttctcatttcttgactggcaggagagaatgcttctcattcatttccagattttacttcctccctgggcctgactaagactcctgcttatgaaaggggcagcgtatttagcaccacagcctccaactcagaccacactcaggtcttcccgcatcactggtgtggtgagcatgccagtcttctctcattctagcccaagtacaaccgctcccccgcaccctttccctcaggtacctgtagtagccggagacagagaagggacaggatcccatgcctgatataaatgatgggtggcaatattctctctctttgaaaccattgcttgaatctcttgctccacaatccctctgataatgctcagcttcctcccaaacctacattttagaaaaaaggtaaagagtgttttgtttccttcaaaatcttacaagtgaaaaacaccagaactttccctccgctttgcctaaaggaacctggtgtaataccaaatgaaactcacttcctaagtgagcacctgtccgtgagcccttaagtgggtgttctactagttgcctgctcattcctgctctgctaacgtcttcccctaaatgctcaataaccccacgtcagttcctgtcacgtttccagcttctcactgaccaggaggccacctttgggtctgcatctcctgcacaggccacacggacggtgttttcaattctagcaatgaaggaaaacggcctggttgaagctgctggacgcttcagcggggaacccactgtccccagcacctgctatgtcccagagacacgtgggaactcaagcaaacctggtgtcgagagctttcagaggcttgttccggggctgctgctccaagcagcttacagctgggttgccggccacaggcacagtcattgcactgagcaccagtgaggtgatggcctgcacggccaggacgttgatctgggtcctctctgtgtcttcctggaaggagagcccacatgtcaacaagagcagcaagacacccacaaccacctctgcctgcagaacccagagtcttccctgcctcaatgggaggaagaggagccttaagtgctaccaaaggatttctgtcaggctgagctcacggggcacaaggcagggcctccgcacacacgggccctgaaacaatctgatgggcaaaagcccatttttcaaatcaaggactcctttgggcacaaaactccaaacatgaattactttttaataaattatctttgaattccctcatacattttacaggccttgcttatgacaccctgttagcttctatgcatgaatttaaagacaatcttgatgacttgtgacatatgtctaccctccaaactgtcatttctgtgagttcaaaccacaccttctatcagaatcaagggcctgcattccacaacttcccattctgctggctccgctgtaccagagcacagttattattaatatcgtgttagcgtaatgtacgtgaacacttcaagaagcctgataaaatctctgcaagacattagaaaaatgaaaccaggtactactcatggcctttataaagtgccttttcattttaattcaacctacactcctctgaatattgataaactaaaagatattttccagaaagggcacaatcgtattgatccttaacatggaatgcaccgtaataaaatgcattccagccattggtaatcgcagcccccagacctcagcaggctttgtccctgctctggaatatcagtcaagacaccattcagctactctttcaaaaataaggtaagagaaaaaaagaacaccagcttgctgccttattttattccccaccaaaggcctgcaagcggccataactgcccatgtgccaaccagcacagggtgtggccttacttctggtgggctctcctcctgctccatcacgaggggctgcgtcaccaggacaccaaggagggtggcccaagtttcttcaaactgagtacgactggtccagcctagaaatataaatgttacatgagagagtgtcaacccttctcaagcctgtaacggagagctgacagctacgccgacacagcacggcccctggagaaggctccacgccaagggcagtgagtcccttaaacctcacacagttctatgatgcggggaacactatcccctccatttcatcattgaggaaaccgaagtatagacatcggctgcactgtccgagacacatgagaggcaggtggcacaggcccaagtcggccctggcagcctggtcaacccccagtggagcagacacagggacagggcagggacgcccatgcaggcaacctcgtgcagggccagggccacttctgccccactcactaaatgggctaaaatcttccctggagtccagccctgagactgtgcagctggctgcacaactctgtggataaaactaatggccaccaagctgtccgcttagagtgggtgaaatctgtagtatgtgaattctacctcaataaagctgctaaaaatttaaaagtcaaagtaatggttcctctgacctgtctagaagaatagattaaaaagagtgtatcaaggtaggaacggggattcagtgaaaatacatccgacagaccctccatccctattgatgagctgcattcgagtgtatctaacgaacagttgtttctgacagctgtgcttcatgtccccatcatgatgtctgaggcagccacgccacttgtggtaaggccagagagacgggatggggtgcttaggacaggagaactagagcaatggacatcggggtccccgtgataaacggggtaaagaaagaacaagagacagagagaaggagagcgtgcaggactgattcagacacagatacagacaaatataacaatttacgttacagggaaaaaaatgaacaaagaaaatgagcacagacaaggcaaggactgcggcacagtcttgggtcacgcacgtccgatgggcagttcaagagcaagggcacccaagtaagcaaaggtgctcgtgttaggcaagggggagagagcaggaggccactgataccgatcctcacagccaggaagaggaggagctccgtgaggcagctggcgtgaggtacctgctcagggctctctttggacattgaattataaaggggaaagtagaggcaaggtgtctcctgccacaaccttctgggatccaaacaagcctcaaatctgcagaagcccgagggactggggagaggactggacagtggagtcagggtgcccctgccagactttctaggacaagacaggaacattccaggaaacaccacagcagggcacagtcactgagaactgactgattacagtcccaccacaagatcacacctcttgccatcaaataggggcaaaagtggtgacttattcatttagacacttatttagaaataaggggtaacatttgtttagaaatgtaatttctaaatctgcaacaattctatgaaatagacacgacccccattttacatatgacaaaactgagggtctctagaggttagacggacttgccctgcgctgctcaggtaggagggctggaagcagaccaggactgtctgagccccaagcctgctttctccccatgctgcctctaggctctggggaaggcgagtgccaagaaacctgactccatctgctcccgtctgcttgttcccatatgagaaaatggaccactgagacacaacaggatcagactggtgaacacaagaaaacattctgagacaagtgctgccactgtttagcctaaatgcaaaatctaaggcagaatttggtctcacgttgtccactacacatgaacctttcctgacttcaaacaagcccggaatacacaaagctgggattcaagccacaaaacacaggaactgggatctattttctcagtataaaaggagttttgccaacactgcaaaatgtattcacataggtttgtattattatcatgcttaaatcttttctggagtcaaatgagaagatcccagtactgggggctctggatttcctcccggtagatgtccgacaatggtgacctgaaggagaggccccaagagtacctagtgtgttgatgcggtagatgaactccttaaagacttccttttcctggaggaactccacggggatctcagggaatgctgtgccaaaatcccctcccggtttgggtgaccatccaagcttccacacctgagaagatgaaaaggaagtgacatcatccgagttgagtcaggacagacatactgtgaggaagcaggaagcccgacttctctccactgggctccctcctcactaccccaacactgtcccagagctggcaccttctcccccagaaaacagctccaactgcttcctgggacttccttccccatcaagtggccctcccaaatctgctctgccctcccacttcctgtcctcatcctgaggctgctggcacaccccactcagggagtgctgggagaagcaggcaggagttagagacagcacccctcgcccacaaacagcaggtgctgtgctagaataaaggcaggcgttcaatgaggttcagctcagatatgtttattggcaagcaggcatgaaaatgaaccatacagcttatttctgtaaactctgaagtccagttctctgtgcgtgaggtgctcagacaagtgccatgcacagaagaatccagaggcaggcttgatgctgttcaagtggcaggatcagctcacggtctggccagctcagcttacatgccttcagtgaggtgacaaaggacccaacggaaccccaggattcccacagcccatctgcacaaaggcagagggggctctatgataatgaccagctaatctcttacctcaccacaggaaagccctctctttaaatcggttatgctcccctatgctcctctctggtacccacccagggagagactgcagtgcctgttacagctgccttccagatgaccgcactcagggaactcctcaatgccagtgaagagcttgctggaggaattttacctacagcgtgcagcccgtcctggcctatcctcaggtgtgctctggacggcatgacctcaagaccgtgccctcctgcatggtctccacgagcccctccaaaggagcagttactgtctcataaccagatgctaatgaacccacagtgactcgctgtgcaccaagagtggggccgagagcaaccccatgcagcaagtgtggcctgcttctccagcacccctgctgctctcttcccaggaaagcctacaactccctgttctgcaactgcttccagcaccgccaggcactggcctcttcttcggaataagcccgccatctggaataccttcattccctgcggcagaatccttatctctcaggatcaaacaatactgcgtccttggagcaagcctccctagactctccagcatacatacacacacgtgcacacacacacacaggcaggcacgcacccttctcaggcagccacaagcctcttccctgggacctggctccattctccctgacctacacctgctggctcacaccctgccaggtcggcctttctttcctgcctgaggatgctgcaggccctaaggaacaggccccatcatcttatttcagcgggctggtgggagatgatgccatttcactgggcagaagtcagtccccctccatcaaccctcactctcctcaagctaagctcctcatgttatctgaaacaagggttctgatcaataacacctaccttttttttttttgagacggagtcttgctctgttgcccaggctagagtgcagtggcgcgatctcggcttactgcaaccttcgcctcctgggttcaagcgattctcctgtctcagtctcctgagtagctgggattacaggcgtacaccaccacacctggctaatttttatatttttagtagagatggggtttcaccatgttggccaggctggtctcgaaatcctgacctcaagtgatccgcccaccttggcttcccaaagtgctgggattacaggcatgagctactgcgcctggcaataacacctactttaaaccaattctgaagacaactgcaaaactgtgtagaaaaacatgaattatctccaaaggaaaatctcactcactcgagggggtgtggtttctggtctgctattaagcaaagtggtctagttgctctagaatcaggtctaacactaatctcttagggatgtagggcctcagttcattttagaaaacccagtatttctactagcgacctccacacgtggtgcctgaggaaagcagcctggcaccagaaccacagtgggcaccagaaccacagcaggcagcctctgggctgcggggattctgtcccgccctctcacgtgtgcccagcccagggcctaccggtgcctttcaccgtacttggtcttctgcaaggaacgagcagactcaccagtgggggcacacgtgtgtagctgttgacaaggggcaggcgggccaggctgatgatgatgttccttagcaatggcgtgagaaacgccggcacgccgctattccttttatgacccaaggccaacaccgactgcagagactccaccatttctgccaccatctcacaggctgcagtgatatacttaggatctaaacaagcaacggttaagagaggactttttaaaaaacacatcctatatgcccagtgtagaaagcatgacctacaaccagctgctcaagctgtaactgtggaatccacttagactctgagttggccactgaaggcctgcagattctaccttcatatccgcctataccatacaattctccccattttctgctgggattgctggaatggtcctgaacctgagctctggccttggttcccagccctctggcccactctctgtgataaggccagcagcagcctgtgacagctggaagccatcctgtggctcctcagcctcagacttcctttaggacacctcctctgcccctcgtctttctctggtctcccaggacctgtgtctgtccctcagctagtatcaaagggccatgttgtcatccttgcttcactggctttcctaggtcagagtgcttgaggggcttggggcatggttctggtgggcatggaaactcccaaggcagacgctgtggacacttcacacccttgggaagatccacagaatggtgtcttgagtctagaatatcatacctactaaaatatgatttgttgaggcagtgagtgtgtattacgtggctattacccacaggccacgagattctacagtttgggcaacttcctaggatagagaaggacttctcattggacttaagcaattaagccccacgctaacgagttggctttattaatatttttttttttttttgagacggagtcttgctctgtcgcccaggctggagtgcagtggcgggatctcggctcactgcaagctccgcctcccgggttcacgccattctcctgcctcagcctcccaagtagctgggactacaggcgcccgccactacgcccggctaattttttgtatttttagtagagacggggtttcaccgttttagctgggatggtctcgatctcctgacctcgtgatccgcccgcctcggcctcccaaagtgctgggattacaggcgtgagccaccgcgcccggcctattaatatttattggatgacctttaagaagtaacgtcctatcgaggtgattaaaaaaacaaagaaagcttcccactcttgcctaaagagggccatggggaataagcataatcatcttcacccaaacagaacccacttcagggcccgttgctctaactcaaaccgccaagatgtctcaactgttttaaagcaatggaaatctaactaaaaatcatgatagcatttgttgagtattcataacaagactgtcatccgttccaggtgctttacatggagggattaactgattgatttcaatccacacggttggcactattcttatcctcaccacagaagcacaggatccacagcctgaggtgccactcggctggaagatgcagagtagggaggtgggtgttttcatattccttaggtagcaacaagaaatcatgaaatcacaaactgaagcctgaaggacccacagaggtttgagatacaaattcagagaagtccttggctgtgcattaaaatgccattgcttctgggtcattctctaattacaaaaccttgaaccgggaaccagaagagaaaagtactatgcagaagactaaagacaggaaaactccatccacaaccaggattgcacaaaagcggggagaaaaagcccaaaagcactggtgcactcatgattgaaaaggcgtgtttcctgagccacagagcatggaaaagatgcctgatgctccaggtaagcgtgctgtgtaaaatgtgtggacaggctccaggtgaggcacccccacctctgtgggacaggcaacaggggccattccccaccagacactgggctaaagaagctgaagcaccccagcagcctaggggccctggcaagaacaaaagacacttggccaaagaatcttcctcccaacaggcactgccaccattttcctagtaaaatacctactctagaattgggaggaaagtgcatgaaaagccgtagtatatgtctaagtctataactggcttaaatcactgggatttggatttttttttttttctgtaggaaaagcggaattttcttttaaatatccaccaaaacagatggctgaacctgacactgaggttactgaatactcatgtgggaaacatttatttattcattatcactcaacaaaaggttgttgcttgctgaccagaggccgagcattaatttctgagaacacaaagaagacaaacctgttccctgccctcaaggatctcagaataactgcagagtgtgggaagtgcggggggaagggagcgctcccccagtggcatcccagctggtctgtagggtcagagacagccgcatgtgtacggataaggtgttcactcggaaacaaaagagctggcaaagcaatggactacagcctccctgacagctagggaggagcagcaggacacagcggagctacggtgcgcttccaggagtccacactcaccgcggtgcacgtctctgtgaatgatttttaagtcctggaggaacaacatgtaagaaaaaaatgggtcctgagacttactctgtgtgtttggatctacttcctcctcctcctcgctgatggcttttggggtatttgtccttctttctggactaagaagctgctctccaggctgcactgcaactaaaattacaacagaacaaagagaagaatttctacacacttccatcagtgctttttattcaacattttacatttgtgcagcctcacaaaagttgaaagggatagacagactagcctagattccttagaaccaattttagacaaacagacaatactagactgaggtaccaatctcttggttagtggtatatgtctgaagatttgaacttcagatttcattcagatttctaagtccctcgactgtctcctgttggccatctctcaccctgaggttattatgagacggctcaagatactatcaaaatcatcactataacctccaagaagtctggcttttaagtagtaatccctggatctttgttttcaagttggctacaaatgcacagatgaaaacaattatgaaacatgaaaacatcactctataacatttaatttaaaaatacaaagcttcaaaacgccctctaacatgtaaactatgacgtccaattttttaaaaattgtggctaatgacccttgttgaggatactgttccttgaaaagaacaagccacttttattttacagtacgttaatattacaatgcagtataaaaacaaacattttaactctgacagaaaacaaataatcttctgaatgtaatgttattaatcttatgatcatataagactaaatacataaaacagctaagaccaaagatcacagagacataaagtttagaggtatttttgatgaaagctgaaacttcaaaatctaaataaaatgactaaaaaagcaaattccagttaaattccagtgtagactccaatatattggagagtaagagatggggcccagcccttcctgatgcatattttatctacctctccatccccaattcctagcttagtacctggcaaacaggcagcacaaaataaaaacatggtgaagcagacaggaactatgataggaacccaccgttcatggacggggactcaccggcctccaggatgaagtgcacacagtagatgagggagcaggcgtgggtcacaaactctgtggaggagaccacgctccagaggccaggcagctgcagggccaggcagcagcagtccagccctgcctggagatccagactcagcgggatctgctcatggatcaaatgccaggacagggcctaaagggaagtaccgagtcacagaatgcccactcgtgtaccttcgtttggggaagccgtgtgaatcacagttgtggaaccgtccaaagcactgaggggcagcgcgtccaggtgcccttgcccttccagaaggacagctctgacatggctccattacattcagtcctgacccacctattccccaaagtgccagtcccctctctgccacaaagcccccttactctgctgcctctctctccttcagcgctgtgggctcctgtagaaatctctcctgggctacgtggccaccaggccagaggctcttccttggggctcccacagcaccagggcttgcctctgtcataggttgaatttgagagcgtgggttctagggatagcaggccttgggttcaaatgccagaatggctacttcctagctcagaggacctgggcaagtcactgaaattctctaagccttgctttcctcacctgtcaaatgggagtaacagagcctatctcacagggggttgtgagagtcaaataagatgacgcatataaagtatttcatcctgcatacagcaggcacataatataatcagcagcaatcaccctgtgctgtgatcacacgctgactttcccacttccccactaagctgaaacctgaaggacagggatcacaaaccatatgactccacgtggttcagaataagggtgtatttatcattttgtgagtaatggcactgatgccctttggactcctccctttctttggtgtgaggtggaggcggagcctctgtgggtctgcaaagtgtgtccttgctgagggcaggcagcacagcgatggccctttaaggatacaggccagactttaatgcatccagaacgtgtacacattctgggggcgaattacaagcactaacacaaaccaagtaagtattccttggctgacatgtccaggccaacttaagacataaagtacttccagatgattatttttcatgtctctaaaattaggatccacctaacatggtaggtgcagatgagaaggggacctggctgacctcacaggccaccatgaggagtggcgaggtgagggtgaaggatggctacaataacttgacggtgacaagacttactgccaggctgagatggaaaagtgactggactggtcagagatcttgcttttcaaataaaactgctttaccctcttcagtgtcagccccatgccccctccccacagcaacactgagctcccgagctgcctcttacctcaagggttgccaccacgaatttcacaatgtccttctctttctcaggaggaaggtgcaaatgactgggcagtttggagaccaccaccaggtactgtgccagggcccgggccagagtgggcagggactgatacagtgcagcatcccctgaaacagaaggacctcgtgggtgggtgcaaacgtgagcacagatgcatcaacttcgaaaggcagtcaagcaattctctgagaatctgatgaaagctcaagacattgttcctcagtggcacatctacacatccgtccacaggactgcacgtggtttggggctgcatctcccctgaggtctggcccagccttcctcaagggcttagagccctatgtccatgaccatgtcaatgaatggcaaagtggcaaacacacaggaagaaattctgagccgaggacacccgtgctgctctttagctacctctgtaaacgctttcaatgtattagatccactgcctttattgtacatttacttggtgcaaagtactatactggccctggaatgctttttaaaaataagataaattttaattttaattaccaaacagatcattcaacttgctccagtaggccgccggctctgcaggcagctcgggctggaagacatgatggacagcagggagctgctgcacggtgccgctcacacgggccagagtcacctcacgggctgcttcaaaaagggcactcttctggccaccagaaatttcactcatccctaggcttaagcatggagctagcaggcttaggttgaactcctgaaatcagagcattaaaggttaacaaacaataacaacagattatgagctttcaatcaggtaagaaaaacacaacagaaaaaagaataaggcaaatgtttctgagaaaatacaaattggtataccatcaaaaatatttttaagaaaattctactctatgcctgttataaatatttgaacaatttcattcaacatatgcttagtaaaatatatatctgttctctcttagtattttaagtaatattttaattttttatgctcttggatttgcttgaaataaaaattttggtatgacaattttaattcataaaaacaaaatcaaagctaaagtgtcatccaagacctcagtgatacaccaaccaccctaaagtttgaaaaagatgttcaaatgcagctgaaatacgtaaaagtagccatatgaatgccaaaattttggttggaaaaatggtatttcttatgtcaatttggattatgttttagcaacccttttgtttagccatttaaagattggtggccgatccttcaggtaaaacatctatcttagtttaatactcagaaaagcatcatgaatgccaaaagttgaagctttcttttacagtcagaacttttacagctgttcaaagcccaattagcaaatttggaaaacctaataaacagatcactaagcaaatttatcactcagtaagttagctttcactgcatgaatcttaagataaacaattttaggccgggcgtggtggctcaggcctataatcccagcactttgggaggccgaggtgggcggatcacctgaggtcaggagtttgagaccagcctggccaacatggtgaaatcccgtctctactaaaaatacaaaaattagccgggcgtggtggtgcatgcctgttaataccagctatttgggaggctgaggcaggagaatcgtatgaacccaggaggcggaggttgcagtgagccaagatagcgccattgcactccagcctgggggacaacagcgagactttgtctcaaaaaaaaaaaaaaagataaacaattttagtaaatggattttgggctaattctcctgttgttttcagttgagctcttcagtacatcagaacacactgttgtgttgccctccccacaaggtctcttttcatgaacacctgccgtcactcccggcctctacaggcatttgtcctcccaggtgcccacttccctcccatttgctgcatatcaacgcagggctaaagcaccaggaggtttctcccgtcctagtaggtctgagaagaagccctgcttgggccatggctgcaccatacccaagaggtggcccccccactgctcacaggacctgcccacgggtgagggacagggacaccaaggctttgcatggcctcctagctctgcgcagggtgccctctgacatctggggttggggggtgaagaacctcactacatctaacagaggtgtgagtagaggaaatctcgctgcatccaagggtctcttttacgactaaagatcaacttccaagacactagaaacaagttattgacgtcacgcattacgacactgtgttgaagtctacggcaaatacgcaaccttgacttccattctgtcttggccatggagcttagatgataacatcctgtgtttgttcctccagtggaggccagatagttctcatcccaaaccatacacccagccttggggccagctggatttcaaaacaacacctccgtggattctaatgtggctgaaacaatgtgcttttctgtctcgatcagcataacccccatgtcccgaccccatctgaaatggagtcctccccacttcccggccccattcagagtggagtctctccgacatcccgtccctgcccagactggagtccccaacatgtgttgtcaacaagtgggtcacatgatgatgagacaaatcccacttggaagtcacaagaaaagctgaggattccttgcctccactgctccccccgtaccgagttcatcatgaaggcattcatatcttcagcaggaatccgattcaccagctctgcaccttccagcagtgcagaatctgacctggtccaacactgggatttgacaagatgaacgtaccagtcctgggaagaaaaaaatggataaggggaacatgatgggcggcgttcaaggggacttcacatccctggagctacaggcctaggccagtgcttgggaacaccgcactaggctgagagggctgccggccggcaggctgtggctatacggctcaccacaccacaggttttcccctttggacttctgttacctgcctgggcaccctcacagcctcccccttcacctggtgaacttccaataggccttccaaatatagctaaaccactaagggttagcggcccctttgccatcctctcctgggttgtctgctttactcatctctccccagcaaccagggcagggcaggtgcttagcgaatagagcctaagaaggcaggactgaaccttcgctttcttatacttgggctgctggtttttgaaatctaaattcatattcataagctgaactttgtccaggaaagtagagtaccaaggctctaccaaggctctaccaaggctccaggtggtccctaaccatgaggtatgagcagtggaggtgctgacaacataccagaatggctggcagtggcagtgcaactcacaggtggccagaaggtatgaggagatggagggaggctaacggcattgacatgtgcttgaaggcctgtgcagtcaggggcctgcaggccacggccgactattccttgattcacccactaactactcaccccacactcctaccaaaagggtcccacatcagcactgcttggctccctcagaccttgatggccccccacgtctctaaccacagcttcactgagccgagccgagcgccagaactccttgggtccacggcacctcctctgcactctctgtatctgccacaggtgacagaggcactcagcgccctgtgcctcccatgcagacacgctggacacttactttgtccggactcactgtttccagtgacacgtgcccatccccgtccagcgggtgggaagagactggaggagagggactaagtgagtcttgcatggtggagagacgaaacctgtccagcagggaatagagcctttggtgtctaaaatacaaataaaaatgaaattacagtataatttgtttttttttttttttagtcttagtctaaactctgcacactaggattctagaaatatacactctaaggagatgcactattagtggcttcttaaaggaaaatacacttgtttaaacctttttcttcacagctatcttctcatcaatactcaaacaggtcatgatacaaatgcaggccctagtttacttttaagtatcacagtttgtactccattaatattttccagaaatttcatttatactcaaacactgcaacaggcaatacacagtataaaagctaataaaggctttcttaataaatgtaaaacagatcatctaagactcaaatgcacaaattccactatcaaatatcccagtaagacaactgataggaattcatggtcatttcaaaataaaatcacctcatctggcacaagatatttataatcttttaatctccctcatctggactgaagactaagtctagggtcaaaaagtaataatagtttatctcccgccatctgctatgagagtgacaacttcataatgcaaattacaaaagagcttggccctacagactgaaaaatcatcccaaactgtccacctaattgtgcccaatcccatttaaaaacaccatcaacaaggtactctaaagactgaaaagcataatagacaaggtactctaaagactgaaaagcataataatttttgtgtgtttttccttttttgcagtttcagctcaaagtacacagcatgataattatattctccttctctgctgtctctctctccctctcacacacacaatccctgccccccaccccgccccgcaagggaaggaaaaaggtaaaagtttaacttattctgcagtcatggaaatacactcacataggagatgtagggatttctgacaaaggcttctcaaagactttgcaaacacaactaaatgattaaatgctttgaagacataaaatggcaacaggatgcagatgtaagtcctgcatgccaaggattgagtaatgtctctcagatttgccaactcttgtttagcaattagatgacatgctttgattttgctaagataaacctgataacctattttcccactcatcacaggacagtgaatacaggcattctaaatgctacctctcaaacagccaccaggagtgcaaactgcctccactcacgtcacagacgtgatcctgccggtcatcctttactctttagaaagtgagatctggttgttttaaaagtaggaaggttctattatggcacttctgcagtaaacccacctataaggcacatcgatttcttgtcctgtgaatttattcccgtacaaatctatatcctttatatcctgggttgtcctaacacaaggacgacctgtgtttccagcattacctctgagcgagcccgctgctctgaaggtattcctggattctgttgagttcttccattggcaactgggccatgctgctctaatagacaaaaacacattagtgtgtttgtaacacctaacaacccaaaataacctcatgctcatttaaaaaggatgaactgatgtgtacagttcatcctagtaagggcagactagaaaaaaatacaagaaacagtcagatcggacacacgagtaacggcaagtttgcagatgtttccatgtttctatcggtgaccatgtcaagaccatacttacggaggaaaaagccagccacctgttttgcttggcctgctaaattttcaatataaatcaatatcagggtttctcttcccaatacctgtaaatttgcagccagaagcatttctacccggcgacaagcaaggatgtcgaccatgcgagccagcacacggaaaggggtgcacagaagcctgtccacatacagcgtgagcacagctcccgactggctgagatggatcccctccaagcactgaagagttttcttcagcatggttggctaacagcaagaaggaaaagaacaaaagatgactattttgcaaatcagaaattaaagttaaaaatttcaatactccatttttaaggcagggaaaactgcaactggcaatagtcggcaggatgaagacgtacagttgaaaggttttcacaacgagactgaattgcctggatgaacaggccgctggcagcagagttccgatgaacggcactgatgaagtcctgtactggaggctcgtgggaaaggctgatcagatcttgaatgtgatttacaatgagccacgttaagtgctcggagtcatggaggttctgacactaaggaaaaatatgatgagagattcattttcaagtacacaagaagagaccaggtattaatgccatagaaaggccagaaagggtaagaaggagaaaacacatcccaaatataaacctcactaaaaatatacagtgtatgagcacaaataattgaggaggtaggaaactcgatttaccaaggccgtcacctccaaccacgcactgcggcagaggctgtgtgaagttaggccccctggggaagtagggtacagcagtccagctctcagagacactaacaaatggccaagggtcaaaggacaaaggcaggcctcagcgagatccgcaggtagcaggggcagcgttgcgctgggatgaccccatccacagcactgcctgccctctcccgggcttcgggccggctaagccagtggggttctccaattactctttttccaattttgtgatagttcagtgggaaaaaaagaatcccctatcactgccacagttttgacagaactgttgaatccaaaatatgaatggatcccacatatcaaataaatcttaagtgtagatatttaagatttataagaaaataaaaatatatatttttaaacatgcagagccttttcatcttgattcataatcctaggcagaaactgtaaaatgtgatcaattccttgatatttggttaacgattaatatttttcatttgggatcatctgacagtacaggttgaataacccttatctgaaatgtttgggatcagaagtattctgaatttaggatttttttcaggttttgaaatatgtgcattatacttatttgttgagctccctaaatccgaaaatctgaaaccttccaatgaacatttcctttgaacataatgtcagcactcaaaaagcttcagaatttggagcattttggatttcagatttttggatttgggatgatcaaactttattaacttataaaattagtatcttttttcttatatttctgtgaaaaacagcattataaattatattatccttaaaagtagaacaaaatagaaaaactacttcaatagagaaagtaaagcaaaaagtgactattaataaattgtcatcaccagaaaaagtctctaggataacacctctttcagttggagagtcggcttccttttctgattcagaatatttaacactgttttgctatgtgacagtagtatctataagataccatgtttgtgacaaagaaatgcatatgttttaaatatttttaatataaatatagaaaaagtattaaatctagaccaaaatctaacagcaagttatctctgagtagtatgattacaggaggttttattttcctccgtttatttgtttttttgtaaattctccatggtaaatatgtgatgctagttttatggttaaaaactcccacaagttatttttttttctttaaagagaacggcatttaaacaggaatccatcataaaatgtgacaaagaacatctaacaccttttctacaaattaacttaaaaaaattattttagagcaggggtctcgccttgtcacccaggccggagtgcagtgacacagtcacagctcactgcagcctcaaacttctgggctcaagcaatcctcccttctcagtctctcaggtggctgggaccacaggcatgcaccaccacgccaggctaatttttctttcttcctctctttctttttttggtagaggcagggtttctctgtgttgccaggctggtctcgaactcccaggctcaagccatcctccgccctcagcttctcaaagagctgtgattacaggcacgagccaccacacttggataattttttattttttatttttttagagatgggtgtctcacaccatagcccaggcttgtctcaaactcctgggctcaagtgatcttcctacctcagcctctcgagttgctggaatttaggcataagccactgctcctggtattaatttttaaaaaaatttaaaatcagaaccccactacagtcaatgcacttactttgttttttaaatcattagttattattattccattgcttccctcaaattaacaaacatacccagcatcatgtaggcgtgagccaatagccgggcatttgataaatgagtcagctgcaaaaactctcacagtccaacttagaatccagtgactggaaggccaggcctggtctccaattatatgtcacagcagaagtaaacattcattctagatttagtttcgatggagcttggcaggacaccgggcggtctgggttccagagggtccatgcaagtgtcatctacacaggatgttctcctggtccccacctccctcaaccccgtttacaggcatttcaaacttacgacataatcacagaagagaatgagagcccctcttcgtactatttctctattgcacattccaagtttggctgccaagtcagaatcctcctcttctccagacatctggggactaagtaactttgtgctggacagactgtgtcttctagaaggagcaacagatgcattgacaatgtttctggatggcagtgagcttatttgcaaaatactgaagatgattatgtttaattctagttctaaaacagacaagttgttttaaatattgccatatcagaatgttgtatgtgtaatatatactctcagttatctattcctaagctacaataaaccacatatgaaaaactaaagaaaacagaatttaacaggcagaaaattaaaatgcttgcctgaatagcaaaatccaccataaagctgcacattcaatcagcacctttatttcagaactcacactggctatgtttgataattgagcaattgcttttgaaattctccatctgccgtgaaagttgccaactgccagaatgaaaacctccctgctttcatgttttactgttcgtttcccaatgaaacatcaccactctaaacatgttgatgttatacgttatggaaatcctgtttaaaaacacttcttccccactaacacaggttatttcactctacactgacttctcactttattgtttttttctttttgaatacgtgggaattataaaccttgagactcttggctctagtccatacagttaaaatgttgacacactcccaaactgcccctctgaccttcagggtctgaccgagcgacgtccttcccattgcggcaaagggccttaacggggacagaggtcacatcaagctaagaatattctgaaatacaacaacttttcctgtaatccctcaggatttagaagagaactggtaaaaaccaaaattctacagatttaaactttttaaaaagtgccttttctctgtttcccaactggtgaagtgaaaacaaactacagcctagccatacaatgctcagcagttgcaaggagcgagccaccgacgcgtgggcaacacgcgacagaactttagacactgctcaccgaaaggggccagactcagaaggctgcacaccgcgtggttccgtttctttcttttttccccagagacaacgtcttgctgtgtcacctaggctggagcacagtggcacgatcatagctcactgtaacctctaactcctgagctcaagtgatcctcctgcctcagcctcccaagcagctgaactacagggacgtgattgtaatttttaaattttttttttctggagatggggtcttgctaggcagcccaggctagtcttgaactcccagcctcaagtcatcctcccacttcagcctctcaaaatactgggattacaggcatgagccaccacacctagcctatagattctatttctatggccttctgcaatgggctgaacagagggacagagcacggattggtggttagacctggggaggggcaggatgtggcagaggaagagggaactgtttgaagtgacagcactcctctatatcttgatgtggttgggggaggggggctgttactgactacagttgatagaaaagtacattttactgtattgtaaattatgtgtcaatgtgaaaactaacgaacaggaaacgtgccctttctcagtgggccgtcctgccagcgcagtgtgacttacactcaagctgtaattgtgcactttgcaataatacagctatagggtaatgagcctctgaaagagaagaggcagtatttgcaattcaaatatgagcagtagacataaagaaggtccactgtcaactcaaattcagccccaatttgtagcagcacaagcccccccaaatctcaggccatacaccgcccggtactggtggcgaatgaatgtcccaaatctagggtgactcagaacaagatgagctgggaagtgaccaacacatcatgtgtaccacaacacacccacaagcgccaaagtataggcaggactctaacagttcaccaagaggtaagacagattgagagtgaatcataaacccacagtgacagagtccataagagaggggctaggctagggcaggacccacataaggacctcctggagcagagcacccagtgtcgcctggagccagctcccatctgggagccagcctgagaggagatgcacacaaaccgagagagggtcaagagtaagcagcaggaatttctgcaactggatacagcaattttatggctgctgagtctatggctaaaaaaagagcagctgtgttttgtatttcacacttctagtaattcatttttctcatctcatggaaataaaaagatactcatcccccaccacccacagctggaaaaacacagtgctaagagcaggggtttaaaccagaacagctctgctctctatgggcatcttggacacttatggggatttattttttccttccaccacggggacaccttagacactcacatgcttgttacatattatcttaattttacctttacattaccattaaagaacgatattttttgaaatttaattattaggttaaaaatccattgatccattaattttttttttttttttttttttttgagatggagtctcactctgtcacccaggctagagtgcagtggcgcgatctcagctcactgcaaccttttcctcctaggttcaagcgattctcccgcctcagccttctgagtagcagggactacaggcacctgtcaccatgctcggctaatttttgttattttcagtagagacagcatttcatcatgttggccaggctggtctcgaagtcctggcctcaggtgatctgcccgccttggcttcccaaggtgctgggattataggcatgagccaccacgcccagcctaatctattaatgttatttcaggataatagaaggaacaatacagaaggttataaaggaaaactggatcagagggggtcacgaaacagtcacagaatttacctacatttacaaaaagctgtagtttgccctcagagggctgaatgaagacgcttgctgaattccaaactaaatttacctttggtttatttcttttaaacactcatcatctaagcatttctgttactccaattcaggggacacaattcccagattcagagctttctgatataacatcagagtaagcaggcccatctgtcagaaaaggagtgatctgctgaatccgcagctgatttctatgcacgttaaagcagcacagaactaggagacactgactttctgtctcctgcccccacagtgctcagtcatcgtaacaggcctaagacatccaccaagcatttcaaatgtcgtcactggtctgtctcctccaacagaatgaccagaccccactacatacggcacagagtggatggttaagaatgcctcccaacagtggactttccagctgagtgccatgaactggccctactgggagccctggcagcacaaggtccagtatccatactgagcagagaggcacggcagcacctgccctcttttgtctccagaacttcttttccccagcgtgggatcttgagccttccagaaatactgtgctgaggattcagctgggcgggggccagggttgggggtggtcacagcttttatttccatacatatacaaataatggagtgttggagcacctagaaatggagcttaagcctgaaaaccttttgcaaaaagagggccacccataacgagaaccttagtaagcctttttgaatggtaaaataacatttccaagaggttttgaaatttgctacactgttacttcattatctaaggataaccagaaccacatttactttataatgaggttaagacattgcaacatgtctggctatggaaccaatttaaggactagaacttagtaggagccacagagcatgacaagcatatcccacaagatgcaatggtgtcaaagaacctgccaaagaaaatcgcatttagaaagcaactgctattttgaatgcctttagctggaccgcatgtttgtcccaataatatgctgtccatgaaaggaatattaatatgcagcagaaatttcacaagccctcacaaaaaatggaaaatgaaaatgctttaacggtggccaaagctcaggttactgggagtctcaggacagggtgctgggctggcgccctgggctgtggggcattatgaacctacttcggggtctgctgcacttctgcccaccagcggtagtcggtgtggttgacaagcagcagtatctgacaccagagcagcaccagggccgggtgggtggtgatcatggaacgagcccgcaagttcaagctgtccagggtgtagaaactgccgccacagccatcactgcggaacagcctagtggcagctgctgtgattctccggaacattcctagaaacaaagttaaggagaaatgtctttgctttcatctcggtccagtgccacatggctacgcgaagattttacataaaaatgaaacaggctgagtcgtctcccatacttacgtattcagaacacctggcatttagaaaattctgatttttctaagcagaaacagatatcctacttttttttttttttttgagatagagttttgctcttgttgcccaggttggagtgcagtggcgcaatcttggctcactgcaaactccaccttccggtttcaagctgttctcctgcctcagcctcccaagtagctaggattacaggcgcctgccaccacgcccagctaatatttgtatttttagtatagagggggtttcaccatgttggccaggctggtcttgaactcctgagctcgtgatccacccgcctcagcctcccaaagtgctgggattaaggcgtgagccgccgtgcctggccaatatcccacttatttaatggactggtcaagaaagctagcattcctcctctctcactgtcgacctccacattggtcggcaatgccaagccctccaggagctccaagccaagagctgcgaaagtctgaacacagctcctggagaaggagtcagggaacactcagcgcctcgaatcactgcactcgggccacagcggggcccccacaggactgagccacagctacacaggcaggaacagcactcggcacctgccaaactcaacagctcctgggcttgctaaggactgagggacagaaatgctgaaggaggccaggtgagaaagcaggacccccctgcggtccaggctctgtgtgccctctgcaggctcctgacacctgacagccaagtggcctctgtgcccggccatggagcatcctgggcctaggcaggccaagcggtcagcctccccacacacaatgctggcacctcagcaacacactcagctagattctaccggcaaatttctccacagcatccttctcagggctccaggaatcatgacttcattctatcctctcctttggataaacaaggtcaaaggcacagagacatgcacaggctgcaaagcccagcagggagaggcagcaagacttgggaaacagagaaaggcccagctggccaaggccaccctctcccccagatctgggctgcctggcatcactgttgggatcaaaattttatttctgatttaaatttcaggccgggtgtggtggctcacgcctataatcacagcactttgggaggccaaggtgggcagatcacttgaggtcaggagttcgagaccagcctgaccaacatggtaaaaccctgtctccactaaaaatacaaaaattggccgagtgtggtggcgggtgcctgtaatcccaggtatttgggaggcgggagcacaagaattgcttgaacccaggaggcaggggcagcagtggccaagatcgtgccactgcactctagcctgggcaatggagcgagactctatctcaaaaaaaaaaaaaaaaaaaaaaaaaaaatcaacacatccccaaagtgaaagggtcctaaaacaggtaaaaacagagtacaggctttttagggctccacaatgccttaaactataacctgagaccaaggaagcgagctaacagaagcagcacactcagagaatgcagaccaggtcacgacgaggagttctaatgccttgtctctggctcctccaggtttcctgggatttctctacacttgcttcctggtcagcattgtcccctccagcccattctgcactggcctcatccttctgtggggccctctgttcctgcatgggccccctgagtgaagaggcatgcactgccttcaaggaagatgcagccaggccacagagcacgtgcagggacagacccgggatgtaggggttttgaacaggtaatagaaacccacaatccaagctgtgttctaggtggctgagtgtcaacacaggctctgaatcagactgcctggttcagatcgtggctctactgtctactacctgggtgaccttggatgcaccttacctggggcctcagcttccttaggtgtaagatggaattaagagcagtatctgttcgcagggctgtaataaggagcaaacaggagaacccaggtaaagggctcagcactgcacaaggcatggaggaagtactcagcccccggggtggcagctgctggagcctattagggaagttcaggtggaagatgagacggactctgagggccacctcctagtagatagagaggaggaggtaaggttagggttcctggggtagcgggaggaggaacatactatgatgctgggattctgaacatccctaatgatctaattaacaagaagaggccctggagagtgacagtggtgctagttcaattttaagtgcaagtctgaggtactggcaggacaagtcccgtgtcgagaagctggatgccaggactacaaggaccagcaagagaaagttgtccatgagagcaacagccaaggtcacaaaggggatggacctaccaaggccaaggagagaggcagaaacacagagaaaacagtaacgagagaccatggacagcaactcgaggaacacaatcaattaagtggctagacagagaagaccccacaagctactgagtgacaagagggcagctccacagaatcaagctggagggcctaggatgagagagacctagaaagaaagaacacaggcagcctctgcaaaggcctttttagtaaagagggcaagaggcaggctgccatggcttgagaaacaagagggaaacaaaccaccatgggcaatgagaatggagtgtacacagagggagggacccctcatgaaggaagcaggagggcacaggaagtgctggtttgtttttcatttaaggctggcttagtgtggctgttaagtgtaaaagagcagctacaggcaggaaaggaaaggtaagacatacatgtttcgctacggtgaagtatgcaatggatttttttttttttttcagacagggtctcactctgtttgaccagactggagtacagtggcacgatcacagcccactgtagctttggcctccggggctcaattgatcctcctgtctcaggttcctgagtagctgggagtataggtgtgcgccaccatgcccagctaatttttgtattttctatagaaacaggatttcaacatgttgctcaggctaatctcaaactcctgggctcaagcaatctgcccaccttggcttcccaaagtgcacaggattacaggtgtgagccaccacacctggcctgcaatggatatttttaaataagcatcaaaggcaaaattcaattccagagaatccagaaggatgtggcgtcaggaagcagacataagaggggccaggaagccggcaggaggatgaggatgaacttggggacaggatagaaggtcccctgttccgctgggatgttatgaggaacccagggtcccttccaggtggagggaggaacaactggacagaggctcatgagaaggattcatcactctctctgcggagagcaaggcagacacctgctgggcatggtgtgggcatatcagaatagcaaaagctttagaaggcatggcactcgctgcagctcattctgaagccaccactaatcccatggtgacacccgcctggtcccctccttccaagggtttccctgactttcctcatcctggaatcacctgtttttatcctcacagaaaacacatcagagaccacagtgctgctgctgggaagcagcaggacgacgtctctcagtccccttttacagggtggggctgtgacctgtcaccacgagagaacaccagcaaaggcatgcctgtcacttatccaaggccacaaagccttctttaccttccctctccttgtccccaaccagacacagaggatgtgaaggcctggagaacagaaccaaaagaaggaaaggagcctgggtccccgaattcccacatggaggaaaaccatccgtgaaccaagaacaccctcaatacattgtcataaaaccaagaaacaaccttctctggtgtgaagccatggaaatgttggtttatttgttacagtagctaccattacctaacaaagacaacagtggcactgagaacgtggctgagatgagaagatgcttctcggtggaacctcccttcctagggtcccgagtagtgatgagcagcagtctgagacagaaagaaggcagagcctgtggatcacaagggtggcacaggggagccaaagggactcaggggaagagaaagggaccaagtgcccggagaccacgatggcagtgcaggaaaggaggcgggcaggaaggcggatgcaggctgcacccagagaaacagctacagctgcacgcagcagctccgcaagccgtgtttttgtgagctaaacaaagaaatattaaaaggaacaatggaagcaggaattggaaataaagaatgctgttttcaaaacaggcaggatgtgggatcgcatcccaattccaccatcgagagctcctagggcagaaacctctctgggctgggcttgttcagctatgacacagagagaaccatctcttctccacgccacacagtgactggggcccatggtgggtattctgaaagtggcagcggctacactcaccactatcaacccaagaagtggcctgatgagagaaagatcgatgggcaagaaagaatgcttgggttttcattcttggttttggcacaggatcttttagaacttaagcacaaagcgggaaatacttcacagagcagttctaagaattaactgggataattaaaattaaacctaccacatacccatgagaaaattccattgctcccagcattataattgttagtagccctgtcctttccccaagcatgaacttgaatcaatgtcaactttattactatagaaaggaccactttctctctcttccagtattcctgctttgccccaaaaagtggaaccacagacgctttggaaaggacagggaagagctgtcgtgcagccatcccctctgccacagaggaaggggtgagcatgcctccgtgagcgtcatggcacatctccaccacccacgaccaggactcagggaggaaggggcagcagctcctgccaccctgactgggtatagtctggatggcaggcagggaagagcacaagatgtgtccttgaaaatcacggtgagcaaagctggaaggccgtgttgaggctacaaggccagacagctctaattcagccacatggacaacaaacaaagctgatgtttccacctcctgggcctctggtgccatcatctgtttctaaaccagtctatcttggaccaaaagagagggatgctggttaccccaaatgttgtaaacaggaggacagctatctttcttggctattctgcttatcctagatggaatgtgaaataggcaaaccactttgggatgaataccctcctctcccaacaagaggaaaagcaggaaacaaaaagtcaagggtgccattctgactagttcctgaaccaggtattatttaagaagtacccacgcctgaaatggacaaatttaaaggtcttcattttcggtttatgggtggaattcatagcctttgtttaagcagtacgtgaatacatattaccaattttacatgctaaacacaccttacttatataaaaacacgagatgaattatttcaactcttatcttgaaaccaatcaaatacagtaattctgccacctagtgtctttcaaataaatgcagtcaaaggaaacaagaagacagaaacacacatttatatatacacacacacacaacttacttgcaaatgttgggcagattaaataaggtcaaaagataccagcaggaaacccacgtgccctctccaagccctccactcccaccagtaaagctgcttctcaacagacctgcactgtctcatacaggagccactatccacacagagctgtttaaatttaagttaattaaaattaaataaaattataaattaagctatccaatcagaccagccacatttcaggtacagaacaccacatgtggctaaaggcaactaaattagacagtgcagacatcctgtctctgctggaagtcctattggacaacacttcaacagtaacaatattttgcctcaattgtgagatggaaggagaggaaatcagcgcaataagacagtgaccacatttgagctgcacagagatcgctcggacatgtagaaggacacagaacacaccacccttatcccacaaaggcaagactagtccttagaaatgaggctgtctcctcctggcatcaaatccaaaccaactggtggcaaaatattaaaatgaccaacatactaaaattgacctatcattcattaacaagccatattttctcaactttaaacttattacagtggtcagtgaagcataatccgaagatctttaaaaagaaacaagaaaattatttcaataatagcaagtaaggctcaaaaactagagtccactatgaaaattaaattttggccatggcctgtgcggagggtgacagcagctgaatgcagaggccatgaagaggcccctttctccaggattctgtggcgccgtgcggccgggccctaccggcatcctgcctgcctgcctgtactctcagctgctctcttgggtgccggaactcttctctgcaaaaagctagctacttctctccctcagaaatcctgcctctgcctgcccacccatttcgtctgtcactgcactactgttcttcttcataggaaatatcaagacttgtgatactgacgcactgactggaagttccgtgcaggcaagagccaggatgctcaactgaacttggcacaaccagagcctgctagcatggaggcgggccacgccaagagtatcctcaaatggaccaaggctgaaaatgctatcttttactctaagatatgtatgcaaaatgtgtacaaaaatccagtaagagaaaggagctttgatcacaaaagcaccctgctcccatccctttttaaggcaactacttgttatcatttctgttttcagttctggtagttacctccaaaattctaactgctgtgctgctatcccttgcagcagaccatcagttactgcatgtgctcctctcccttactcccggagaccagccccacctcctcatcaatggaatgctgtccagtctcccatttggcccatgtggaccagagcattcaggggtttatggtcacccatattactcatgcaaggccaatcacataggcctacttgaggggctgagaacacagcctgctagaggtcatcttcggtcatgtgaaaacagcccaccagagaacaaaactaacacaggaagcagagatgagactgggcgtggtgggtgacacctataacctcagcattttgggaggcagaggcaggaggatcgcctgaagctaagagttaaagacccgcctgggcaacacagcaagacttccatttctacaaaaaaattttaaaacctatccaggcatgttggtacatgcctattgtctcagctacttagaaggctgaggcaggaagaactctagagcccaggagttcgaggctagagtgagcctcgcactgcacttcatgccactgcacttcagcctaggcgacaaagtgagaccctatctttaaaataaaatttaaaaattatataaatgaaaagaagaaagcagagctgagatgcataaatatacaatgcagaccacagaattacaacactagatgcagtcctaccaactacccttgcctgcactttccaggagcttaaaccaacacattctttctcttactctagtttaaactggggttttatccctgcaactgaaagactgttgaatacaatcaccacatcataatttgtcatgatttatagacttcagacaactttagacatcacccattaactctaccgtaataaagatgagatttagctcatttatactacctcctaacaatctgaattacatgtttagttctatttggagacctctgaagcctctatattttggtctgtcaacttcagatgatgtaaccatataatcccaacaatgctaggtgaagattttagttccccttccactccccacctctatctctaccatctacttgccaaattaacttggttagttttccttttatattcatcagaaccgaagacattttcattctgttctgaaaccataattaagtcagtaagtcttcagtgtttcagtcatacattgatttcaaaaatgaaagctcgggccgggtgcggtggctcacacctgtaatcccagcactttgggaggccgaggcgggtggatcacctgaggtcaggagttcgagaccagcctcaacatggagaaaccctgtctctactaaaaatacaaaaaattagccaggcgtggtggtgcatgcccgtaatcccagctactcgggaggctgaggcaggagaattgcttgaacctgggaggcagaggttgcggtgagccgagatggcaccattgcactccaggatgggcaacaagagtgaaactctgtctcaaaaaaaaaaagaaagaaagaaagaaagaaagaaagctcaagcagtatttacattatgactatctgaatctagttcccaagagagccaaggatcctagaaggatggcatctctttctataggtctttgatcgtgactcctaagccgcttaaaggagaacctttttaatatcaagggcttccaacagatcaactgctgaacaatcaagccacattttggtttgcctcatatttggaccatgacttaatgctgtttgctgttactagaaattagaattgcctttctattttcttgagagaagaaagacgtgcctatcccctagaactaggcttctagctatttagtcatttatttaaagcaaagcattctcattacaaacgatcgttcttcttggaaaacacactgtcctaatttggactggctgctttccatgcttgctgcacagctggcatcttatgactttcttgggttcactgtccttgtcattttctttctctagagacatggtctcgatctcgcccaggctggagtgcagtggcatgatcatggctcactacagcttgacctcctgggctcaggctcatgccactactcctggctatttttttttatttttttatttttgtggagatggggtctcttgctatgttgtccaggctggtctcaagctcaagcgatcaccccgcctcagcctcccaaagtgctgggatttcaggtgtgagctaccatgcccaaccttcaccgtccttgatcatttgtaaaagtaacaaaaacatcttggcctccaaatttaacacaggaggaggaagctctcaggtttacttttttttttttttggatttttttttaataagaggcagggtatcattctgtagcccaggctggagtgcaataatagctccctgcagcctcgaactcctgagctcaagagatcctcccacctcagcctcccaagtagctgggactacaggcatgtgcccaccatatctagctagtttttgattttctttgtagagataggggtctcgatatgttgctcaggctggtcccaagctcctggcttcaagtgatccttttaccttgacctcccaaagtgttgggattacaggcataagccactgtgattggcccatcttaaccatttttggctcttgtcttgttttgttttgtttttttgaggcagggtcttactctatagccgaggctggagtgcagtggcatgaacacatctcactagagacttaacctcctgggctcaagcgatcctccagcctcagtctcctgagtagctgggaccacatgcacaccactatccccggctagtttgtttgtacagatggggtcctaccatgttgctgaggctggtctcaaactccttggctcaagcaatcctcctgccttggcctctcaaagtgcttggatttcaggcatgagccatgacacctggtcctcttaactatttttaactgtacagttcagtagcattaagtacattcataatgttatacaaccatcaccaccattcatttctagaataactctcttcatcttgtaaaaataactcccctcccctgcagcccctggcaaccaccattctactttctatatctatgaattaactactccaggtccctcatgtaagtggaatcacatagtatttgtccttttgtgactggcttatttcatttagcataatgtccttaagggtcacccatgttgtagcatgtgtcagaatgtcctttttttaaggctgaataatattccactgtaaatatacaccagattttgcttatccattcatccatcgagggacacttcagttggttccacattttagctatcgtgaataatgctgctatgaatgctggcatgcaaatatcttttcaccaccctgctttccattcttttgggtatatacccaagagtggaactgctgggtcacatggtatcaggtgtactcttacagcaacaaatattttcaactggcacactgggcaaggcagagtttctaccgggcagcacagctcctacactctgagagtgtatagtgcagaatggggaacgagacactccaggaagactaatgtgattcacctaccagacttgaagatgtggatcagacacattagcagtgtgcctagttcctggcaatagaaagtatgttgctgctcactcatttccaccttcagctgttttgtaacaatgtcttctaaaagaataccaaccagttgtaatagaaaccttccaagaaacaaaaaagatgacagtgaattaggtgactactataaagcacttacgccaagtatacatgaaaagatatatggtaaatataaagtaaaaatataggtagagtacattaaccgctaaagtgaaatgcagagcgccgtcgccgtggacacagtcacttggtctctctgtgtatcaccttcctcactgaggatgaaatggcaggtagcatttttttaagctttgtgaactgtacaccattacacaaatacaagctgatcatctgtcacaggaatttaatgtatcatcaattttagccagctgcttcaatgcgacacagggaaagccatgggctgcctgctgaacctgcaaaccaaaaggtgcccagcaggcttactgggcttatctccttcgacaacacagggcatctccactgatgacaaaccaagtgaaggctgcatgaagtcacagccacttagcagaagcagcacatttgcagaagcagctctaactcagtgaatgctcagaatctagcaaaggtggagagggacccatctaggcagcaagcacttacgagtgcctcatcactgtccttggggagcttccaaacaatttatgagggaagacaggatttgatactacacgtatttattggaggcaggctgccctgcagggagaagacttttattactgacagcgtgtaaaactgccagcacatggtgacaatctgagactcacttttactggcttctcttgggtttcaacttccctgacgtcagcgtgcccctactgcctgcccccaggacagccaccccactgccctgccctgcctgaggcgagccactgctgtagcatctctactgaggacaagagacagaacatgacagaacttcaagacaggtatgaaccaagagccatagataatgcaggacggattagaaaattacactgatacagacttctttacccaactcagaagtgaagcaagaccaggtattattccagacttactgactgtgaaacatcacgtgacttcccaaaaggcatgggttagttataggctcagatagaaagcataccttgaaaatgtttcttctggcaaattctttatttgtttcccttcactgtgttcttctagcgttgaagtactgtccccatctcttaacctattaattactgtacaggagattaaatacggagagaaggagagctcctgaatacgagaaagaacaatatcttcagttgactgggaaatcagaaccctcaaaatggccagaattcccgatatccacagttgaacagtgctcacggacgcctaaaataaacataatacataagtcacagctgaagaaaaaaggaagattaaatttcccccaattgccaattttgtgaaagaaaataactcctattttactatcctaccaataaacctctctatcactgagtcccaaagtgtgctcccagaaaagcaggcattagtttcacctgggaatttgctaaaaatgcaaactcttggcttggtgcgagagccacctgtaatcccaacactttgggaggccgaggcgggcggatcacaaggtcaggagatcgcgaccatcctggctaacacagtgaaaccccgtctctactaaaaatacaaaaaattagccgggcacagtggcacgcacctgtagtcccagctactcgggaggctgaggcaggaaaattgcttgaacccgggaggcggaggttgcagtgagtcgaggtagcgccactgtactccagcctgggtgacagagcaaggctccatctccaaaaaaaataaaaaggccgggtgcggtggctcacgcctgtaatcccagcactttgggaggctgagatgggcgggtcacgaggtcaggagatcaagaccatcctggctaacacggtgaaaccccatctctactaaaaatacaaaaaaattagccgggcgtggtggtgggcgcttgtagtcccagcaactcgggaggctgaggcaggagaatggtgtgaagctggaaggcagagcttgcagtgagccgagatcatgacactgtactccagcctgggcgacagagtgagactctgttccgcaccacccccacaccaaaaaaaaaaaaaaaaaaaaaagcaaactctcaagaagccctacccaaactgactgactcagacattctgggggtggtcccagtaatcagagcctgaacaagccgtccagattcatctgctgagccaggcgagagactcaccattgtgtttggagtgacgaacatactccgtaaaagcatgtctaccggacggagggaggaaggggccaaaatctcaaataatgtatttaacactccaagggcttcatgagagtcaatgtgcatctgtggaattagacaccacaaacatttctacgtaagccaaaagaaacgacagcttcctgtacaccagctatgtaactcaagggcaaatcatcataatcatctcatcgtcaccttccctcatttaaaagcattttaagttcagtggtgaaccaagcaaacatttttacaacaacactgtatagctacatttttcccataacagaaatcttgtcatttagatttttattacataaataataaatgctttctgtaaaagactcaaatatacaaaagtgtgaaaaaaaatcaactagcactgcagcaccctgacacaatcattaccaacattttggggaccagtcttccaagcgtccctttgtatacacatacatgggatggtgtgcacttttttttttctttttctgcactccatccctcccacaacagttgtaacaaatgctaagtggtgtgtgtatatccctttcttaatctgccccatgttcctatagccatatccttgccccctcacccacagaggttttgttttagttgttttgaaaaatcataaacgtctctgctcttctcacttaacccagtgcaatggagaactcccaaggcaactggctgaacttcctttcttccttcctccctccccttcctcccttccatttcttccatttatttccttccttccttcctccctccctctctcttctttctctctctctctttctaacagagtctcactctgtgccccaggagtgcagtggcgcacgaatgggctcaagtgatcctcccacctcagcctcctgagttagccaggactacaggcgcacaccaccacacccagctactttttgtatttctagtagagacagggtttcaccatgttgcccaggctggtctcaaactcctgagctcaagcaatctgcctgccttggcctcccaaagtgctgggattacaggcatgagccaccacacctggccagaacatttttaatcatgcaaaatagcccaagctaaaatagtctaagcttataccacagtgtgttcaaccattacttattgatggtgggcactgactgtttccaatttttgtttctactgagtgtgtatacatagtaaacaactctgcaaacagatgtggtgtttttcaaggcacagatgtgaagctcacaacactggccacatcttacaacaagggaacaactgacttgagctccaggattcctgcatcctggaccctcgcctgtgctcaccaactctgcctcctccccagcaactctgggagaacccacagtgctctgtcatccatgcagccaatcctaacccatgtctgtgaacaccacaacggcgatttgtgtctcctgtgtcatgaactgatcctccctgttgcttctgccctcagtgcgtaaacaggccttcatttctgccaacttaacccattgccgactcctctcctcctctggctactgccctatttctccgttccctcttcaagtaaaaccttttcccaagtctctctcctgtcctttcaggaacacattcccattagggtttggctccctttgctcctccaaaagcactcatcagtgccctcggtgctgccaaacctgggccaagttcccaaggtgctgacagcagatgtcgccctcctgcacaaaatgccttaaaaaaaatcttggctttaggaaccccacacctgcctactccccctgccccagcactggctcccctcacctacctgaccttggagctgggactcagcaggctcggtattcaagctcctcctcctctccagccagtctgggtccactgtgagtggacatctcagatgctgaccccctgccccacagtctctcgacaactccaggctcatacacctgatgctggcctcacctcattaggcacctatggggtctcaactgctacatccagacaggctctgacctcctgctgcccccaatgtctgccctaccttgtccacagccaccctgtcctcaccctgaaatcacccccaaagccctgctctctctcacatgccacatctaagccaccagcaaaccttgctggttttgctttcatgctgccaagggatgctgacttgggccattccactccagtgccgggtctcacatgggtggccctgctctgccctcacctccccctcaaggctattctcaactcaggaataagaatgatcctgctaaaacctacaccacatcagcgcaaaccctctcaaggctcctccacactggcctcaccccaccaggcctcactcccttccctccccatggctgccccactcctccaccctcattgcttgtaccctaacagcatgtccgccccccgccagggcctttgcactgctatttgctctgcctggaatgttccttccccaggtatctcctaggcttgtatctttcctttctgcaaattcactcaaatgtcaccagatcaccaaagcttcttctcatcaccagctgaacaatgccactcccaccgcagacaccacctaactctcttccctcctggattcttctgtacggtgttcctgatcagccgccatggtatagacttcactcacttgcttttctattgtctgtccccttacccgcatcccaacaaaatcttcactccaagaaggcagggggtctttctttaatctgctttgatcactgatgtatgcactgccagtaacaggatagtatctagcactacttctgaatgcaacatgcacctgtggtgagctacctggcaggtgctgcactaagcgtttcataaatgttgtatcacacaatttccattgcggcagatattaagtcaggtatttactatgtattcaggccttcgatctccactctactcagattacgcacagaaaagaatgggataaagcttccagggcaccattctaaaaccatctgtaggcagggagaccctgaccacactaaaactgctgtcaatctcaccagaagccaagatccctgtcctgttgtctaactggtctcaagataacattccattatgaaatcagaatgggggtgcagtcatgaaggcagtaacatcaatatcacatgcctctaagtttaaatcaaatgccaaaaaccacggactactcgtactatacagagtagttgtttattgtgtataatcaagatgaacaaacatgtatttgctgagtccacttaaaaggcaacctcaagctgtgccaggcagctcatgagattttctggcagagctgcctcaaggaggtccccaccacccttctctgtgagctacagaggtgctgctacactgggggcacagtggcctgtgcctgactgggggcaggctgcttctgaaactggcactgccaggccatttccttccactgcagttgtggaaacaatgattcatgtcatttgatcatagaaattctgattagtgatgaataggccaggcgaggtggctcacacctgtaatgccagcactttggcaggccaaggttggtggatcacttgcgcccaggagtttaaaaccagcctgggcaacacagcgagacctcatctctactaaaaatacaaaaaactagccaggcgtagtggtgcacacctgtggtccttgctactcaggaggctgaggtgggagaattggttgaacctgggaggcagaggttgttgcagtgagattacacgactgcactctagcctgggtgacagagtgagaccctgtcggaaaggaaaggaagggaaaggaaaggaaaactgctaaattacaagcagtaaggtaacaaaaacaaaaatctaaccaccaaataaaacactgggttgaccagaatgcaggaggcagtgtaggaggtaagggttcgggctttagagttagccttggcccgccctcaccccagcactctaaagctgtgtgctgcctgatcacctccataacctctcggagctgtgggatcccccctgtaaagtaggtgggcaataccaacctgagatggcattgtgagaagaaatgaagtcagctgtcccatgactagcacggagaactgctatcaaggcacagattaggactgaaggaagagctgattccagccacccacctttcacaaggaccttaagctaccatcactatgcaacaacaagccaaggctgcggggacaaacctgctgtttggctaacattgggaggatgatgtcagctatctgtcgagacagtcgcttccacttgtcttcattctccttgtggcactgctgcaggacaagaatgaacatctccaacacctataagagcgtgcacaattagaaagtctgctgccaagagacgcctttccacccctacgtgtccgtctgttatacttgtcccagttcagctggaagactctaggatccaaacagatgtgatcccagcgaggacagggggacactaatgcaacccccactctatgacatgagaaatgtaggggaatcagaacgaaacacaagttcctctagggcacatacaaggtgcacactttgctcaggaggatttgccatcattgttatttgtatagaatttgtaatatttcacaatcagagaaaaggcacaacatgaaaatcaaatgtatattaatctttggcaaacttcaaacacagccttgactaaactattctgcaggtggctcattgcctttgtggacattcacttcaattctgtgttctctgcagaggcaatctactgaagagcacctgcttcccagaggtatacatggttgagcacaagtttattagtgatcatttctaaacagacatatccagagctcactgaacatgtggctgatgaactcctctccatgacacccacccacccaagcagctctgcctgccaccacctgcttgccagttgctcattttcagacctctttatgatacatgtacttttgcattgcaattatgtgatttaattaggcattaagtatttaattaaatactacaggggttcattaaaatatgaatgaacaaagaaagtgctgcttcttatgagaaaagctatggctttatgaagattcaaagacaaacagctaaaaagaattgacaaaataagtgagggctagacaacagtgcaagttaaaagaaaggagaagtcatttaaaaagagagatttctgcactcagccttcctcaaaatgtctttgaattcttatgccactttaagaaaacaaaaccagaaatcagctcaaagaaaaagaccttagccctatgtcaaaatagtggtaaataaatatacaaataaagtttttatttcagagttgagatttctatcattttaaggtttctaccatcttgaccaacactgtcaattgatttttggtcctcgttttggaaaagagggcctcactatcttgaacgatctcgtgactctcagaccaggagtcaggtgaactcctgtggctgtgcccactttaaagataaacaccaggctgggcatggtggctcacgcctgtaatcctagcactttgggaggccaaggcaggaggatcacttgaggtcaggagttcgaaacagcttggccatcatggtgaaaccccatctctactaaaaatacaaaaaaaaaaatttgctgggcatggtggtgcatgcctgtaatcccagctactcgggaggtggaggcaggagaattgcttaaacccgggaggtggagcttgcaatgagccaagatcgtgccaccacactccagcctgggcgacggagagagactccatctcaaaaaaaaaaaaaggatacacaccaacaacacctcctgccactgcacctccccaactccaccacacccccccaccccccgcctccctccccatccccctgcaccggcatctacccaggccccagaaagcccaaacctggttcaaagtaacacagttaacagtgagcgttaccacatggcacttccttccatctgcacgggtcaataaagtatccacgacagttccaacatacattcctcttacctgatggtactggatgagtctcagtaacattgacaccaccacctctttttgggtttcaagctcttttcctgcatcagctttatttgttcctcttaatacaaagaggtcgtggactatgggctgcagagccggtatggctgtggggacaaaagggtacccttatcaggcatttcatggaaattacatttggaaaactgctctcaacatctacaaaatgctttcaagaaataaagaaaacccttacacatacttggtttatggtaagagatgaattaaggttatcaatcattataccatgtggaaggtcaaagctcttcctctgaacactgatcattttgtgatgacttctaaaaaaagaaaaaaaacctagggctcctataatttaacaccacttctgaaaaaaggtgactcaaattcaaaagtcaatttgaaaatgataaaactttccaaataaccaaaacagcaacattcctggtctcaagaataatctacttgattcatctgaaaagacaataaagacttccacataatacatttagtcaaagccactggattattatgcttttttaagtaaactcactctgtcattagatagataagggactttcccccaagtcttattttggtctaacacaggagtcaaaataaattaactggtctactatgaccacatataaaaaaatataagaaatgcctttcattggcacacaggcacactctgaccctcaatgtcatgagcacataggaacactgacccctcagtgacacatacgctcacacatgagcacacacacagaggcacactctgaccccctcagtgacacatacgctcacacatgagcacacacacagaggcacactctgaccccctcagtgacacatacgctcacaaatgagcacacacagaggcacactctgacccctcagtgacacgtatgcacacacatgagcacacacacagaggcacactctgacccctcagtgacatgtacgcacacacaagcacacacacaggcacactctgacccctcagtgacacacacacacgtacacacacacacacgcgaggcaccctctgacccctcagtgaagggcacaatgcaaccctctttgacacacacacaaacactctgacctctcagtgacacatactctctccggccctgagacatgcacacacaggaatactcactgacccttcggtggcatgcacgcatgggtatactctctgaccctctcacagatgaccaagcttcccagcacaaagtactgggtgtggttgcctactgattttctgtccaaagaccctccaagtccaggaaaccaaacacctatgcctttaataatctatactttggctgtgtgaatctgaagcccttgtgaggccgtggcaaacactaactggcttagctatgtaaacactgagaggtcagccaaggccctgcctcgcaacacagcccggttgatgctcttctgcacacacgctgagtcgaaaagactctaagtagtagtgccattctcacatctgggagtttgcaagggtcttaggatgtgtccctgtcaaagttcaaaagcctacagattccagcaaaggagtcagggaggggtcaatagggcaatgctggaagatcagttcaaaaagctcaaagaaagatttgcaactcattcataaaaccacactagctccttccacaggctgggggcttgcacagctggccatctcctgggttccttatttaagctccagcaaaatcatcaggcaaaacagaaagccctgaacccaagtcaaactatatctccaataccactggatgagagatcaaaatttaattcacggcaagttcgatttaagaatttttagtgttgcatcgcttcttggccttttggctaagatcaagtgaagaacttttagcgtttcatgtgaatgaacaggaactttatattcagaatctatctgtaccttaggttatcttactgtttcttgaatttttttccctgagaagattacaaattgctgagagtaaagaatatgctctcttctcttttgaaacgtctctaaccagtaccttcacatacacagacacacatgcagagcctgagaagcacatggctgccactgacaacgttcaaagtgggtatatgaaaacgaacactgccaagcacatcacgacaccgaagacgacagtgaaaggtgtgtcccgttaccatgtgtcacagccttccttccactggccatgatgccatcacagagctgaatgattttaggaattccaatgatctgttttgaatgatagcgttcataagatagtaataccaagaagaaaaagatgtttggaatgattgcctctgattccctaaaaacaaaaacatccatttagacctttcttttaaaattaagatacatatcaatataagcaacataaaataattcatgattcaaccttgacagcaagcacacatcaagctaacaggtgtccgtgatctactctaaccccacccctgccacagtgcatcccatctgtgccctcgcgcagagcagggacatgtgtaaaggttcggaggcagcaggtagaaggcacccgacggcacaggggcacagcagctacgatcttcctagctctcctctgcctctttgctcttgaagaaattgaaactcaaaagagaaacagtaacttgccccaaaacacagtggaggtgtcatgtaattagaataaacactatgtttccagaccccagggaatctgggaacactttccttctgcactaaattttcctaattacaatgtttattaagcattttaggtactaaaagaattttaacttttaataattataaacctgtaatggactagcaagaagtattaaaacctcaacatctagcaagaaaaagctgcagagaatacaaatgcataataattactaaagacaacattatataaaactgctttctctaagaagatttaaaaactagtgctccaccacaagatttcattccaccatctgtcaacacaattaaatgctttgaaatgtgcaatgaatactgacaacatatggaattttcagatacataactacttccaaacaagtcttgagatatacattaatttttaagagaagcaaaaatgcacagtatgttagtcagatttccatttaaagaaaacagcaaaaatgcctaacagtagtttaaacattcacttaataacctaaattacatgtaagtacacaagaagaagaaaaaaatctaaaataataaaatgctattacctgaactggcccacttcaatgtattcaaactgtttcaatacaaagccaataaacacctacaggaaggaaaataaaatttcacatcaataataggattaaaatgtaaaaaccaggcttcttttcctcctgcttatctgcataaattttaaataaaattcttgacagctgataaatttgactataagcataactctattctgaaatcagcctagataattgcagaacacatccaggaatcccctcaacaactttactataccctgaggtgaaatctcattggaaaaacaaataataaattccaagagacatcagacaatacccaaaattacaccttggggactcatctgttcacgttaatggcagatagggtggcacagattccctgaaactggtttagtaataagatacccaaaggagtcgaccttcgtcccccaaccatctgagaggcgacacgtaagggctgcatgggagccagttttgtgtcacactgtattccctgcagctgtcagctttcccaacctgacggggagcttccatggataaagcatggagcatatggcctggttttctcagagcctctgggcagaatgcaaacatacagcaggagctcaataaatctttatcagcatagagttcaatggtttgtctgttctagtgttctattcttgttcataaaactgtcactgtactgaatcttaagaactgggagaaaggggaccggttgatgaaaggcaatcagaacaaacatgaaaccagagcagtctttgttcttactagaatggaacaaatcagggctctggcttcccttggggtacccgtgcccccctgagagcctgctcctctcagcccctgctgcccacagccatagaccagggcttctccccagtcagcctcctagtgtcaaaggaaaggaaaagaagttcccaatgactatttcctgaggagagcaatggcccatttagacggattttcttcggacaggttttgtgaaagaaagatgaaagcatcaggccaacgcaaagcccaccccttgatgcctccttcattaaaagcagaccccaggccgggcgcggtggctcacgcctgtcatcccagcactttgggaggccgaggcgggcagatcacgaggtcaggagatggagaccatcctggctaacacagtgaaacctcgtctctactaaaaatacaaaaaattagcctggcgtagtggtgggtgcctgtagtcccagctactcgggaggctgaggcaggagaatggcgtgaacctctgaggcggagctggcagtgagccgagatcgcacccctgcactccagcctgggtgacagagcgagactccatctcaaaaaaaaaacaaaaaaaaacaaacaacaacaacaaaaaaaacaagcagataccaccccaatacccactgtggaaaatcagtgttgaccgagtgccctcagttctcctagggaaacagaccctttcaggtgagtaacagtgctgacaggattaacagatttacgtctagaaggaaatagagaagtgtaatatttctaactcacaaatattcctaccccacataagaaagtagcccaagatcacggctcaaaaatgacagttaaattttgacgatgaaaaggcagtttcatctgcagtgatttaactgggacgaatcttgaggaaaatgtgcatcatgaagggacaggactagccagaatctggtgcccacagcaactataggaggaaggtaatgcagtcaagaggggaagcgtgcaaatgcttgtgcagagccacacagctcccacatggactccaggagcacgggtctcagttactgtcctgctaaattccattcctttttaaagaggtaagtgaacctgttagatagcttgaaactgcagatgatcaattatggtaataattgataatctgtttaaactaactctagattttgcaaaaatgttccccaaacaataaatcttaattgtatctcacaatttaaattcaaacttattttggaggggaggcaagtggatgggacaaacctttggaaatccctaacagccaaccccaggttagccttgagtccagggagctggggcaaggatgctgacttgctgaggctggctatgccccaggccttctgcaccagctaggtgcatgaaaaagataagcagcagcaactgatgagggaaacatgcagaccacatttctttaaagtagatttcagtgtcttttagggtaatttgtactaaattaggaacaggtatgatggatgaaagataaaagtgacaaacctgatctgaatccagaagacagtaattaacccgtaactgaaccagctgcgccagcaaatctaaaacctgcttctgtaactgcacacatgttgtagtcgtgtactgttttaaagcttttataacaagaggttcaaacaaacgaatgtgattatgaatagcattctataaaaaagaaaaaaagaaagaaagaatccataagtaagccttcaactaaaagcttcaagcaaaatacctggaaagtctcagctccagtttcctctctagcactgacacgcctgagttcacatgccacaaacggcaccatttaccttatctgcacggttctttgtgacactcgtgaggtttgtcttcaactgggtagacactttctggaggacatcaaaccatctgccaaatgggaataaaagggaagcagagaatgagaatatctttaaataatctcctctgcactcagatatactcctgctcaaaccaatttcacattcacacgatcagaacgtgtcagattgagaaacaacttgaaaggccactcagtgtggcagcatcgccctcttcagataatgacactctatttagagtttacagctgcctgacagccatcaagtctcctcactcgcagaaggctactcaagtctgagcttttttctgctacaggaaactgactactcagcccagtcttaagtgagatttgagagaaaggtgaaggtcatttaaaagatcagtaatttagaagaaattacatgatttttttggaggacaagcctttaaaatatttacatcaatgatatcccttctaagaaacatatatgaaattaacccaaacatgcacacactcacatgcttattaataccccaaatggttacagaaagcattgaaacagacttactcctgaaactccaatatatagtaagtacatcactaacatacagcctggaacatgggtattttccttgactcctgactctagtgttttaattgtagctatttaatcgctaaatttataaaaggaaaaacaagggattctattattgctactatacagattagcaactcaaatacctgttcatacttaaggcaatttaagaagtcctgtatactaggcattaaaaacacaaacataaatttaagtgaaaagaggccgggcgcggtggctcacgcctgtaatcccagcactttgggaggccgggacgggcagatcacgaggtcaggagatcgagaccatcctggctaacatggtgaaaccccgtctctactaaaaatacaaaaaaaagttagccaggcgtgatggcaggcgcctgtagtcccagctactcgggaggctgaggcaggagaatggcatgaacccaggatgcagagcttgcagtgagctgagattgcaccactgcactccagcctgggcgacagagcaagactccgtctcaaaaaaaaaaaaaacaaatttaagtgaaaagagacttctagtcataaagctgacaaaacacaaggtaatatatccaagatgcttctatggccttcacacacctctgaacaccagcactactgtgctgctatgaagctgttctttcatccttgttacaggcctgaaaagtgccaccaacacatgccacaccactctacaggtcctgtgctttgaatgggtggggacattatgaactgcattctggtttgctgacacactttggcaatgagagctggctgcttctcagcccactcagtgttcctcctcctctacccccacctctgagatgtgtaagtcccaagcccatctcactcactggccacacacttcttggaaggccgggctatgccttaaatcatctttgcatcaaccatatatatctcctagagttctctgaatacagcagactattagaagatgttcgctaacatttttcgtttttattcttttacaaagtatttcctgcttgctctttcgtgcttccaccaacgacagcattcttgccacaactgttaccccgaggtgtcgttctcctgctccgcctgcaccatgttcctcaggctggcgtcagcgagggcctgggtgaagtgggtgtacggggccatgaagcagtagtggtacaagcctggcctcacactggaggagccaaggcgctgtgctcggccttgtgacttgctggggttggaagataagccatcaaactgggaggccaagtttgtgccaaagagagtcttcaacaactacagtgaaaaaaatgaggcatcaacaatgtggcgtgaacaacacttttaagaatctcccacacaaatatcaaatccatctgtaaataactggatatgttagcaaagactcacagcgtgaaattcttcctgtgaatcactattaatacctcatgagatattgtatgaagtgctgtttgtaccttaaataggcgttttgggtttccttgcaattctaaatgagattgagcattctaaacagaaactccgagggactggaagttaactagcgaggttgcagaggagcttctggtgtcctctgccctccacagtgacagacctcgtcctcctggggagtgaagggaaggatggcctcttggctcaatcatggactgagccaaaaagtgctgcgctggaccccacaatcctcccagctgattatgccaacagcgcctgcctcttaaggagtagcagcgttttgctgtcatacccgaacgtcttaacagaagaggaaaagaatgaagctcttacttgttgaacacaaacagttgccatcattggttctcgactaaagcaggatttcaggtatcctaggatctcttcaacacactgtagaaagacaagtgagacattaagcgactcagagatgacccgttattgtacgaatcctagacagaaattgaaggtacaagataacttccatttaaattgtgtaaatagtagaggaaaatcagaggaaagttttcaatttcttattttgaacagtcagtaaaaagtcttgaaatccaagttatatacattacaaccattctttcatgcatttatgtatctgttcattcactcattaattcaataaactgttatcaagtacctgttgtctattaggtatccagtcctgttcgcagggcaggaattcagaagtgtgcaaagcagctaagagccctgcatctgtagagcccctgaatatgttcagtgaacacaactatgatacagcaatgtgtgatttaccacaaatcagtcctagaattgtcttaaaataatctgcaaaaatgaccaaataactaccttaatgttactcttctcacaagcatttttatcaacatctataacgagatgtacagcacccaatgtccttttcaagaatcaagaaggggctgggagtggtggctcacgcctgtaatcccagcattttgggagatcgaggcaggtgcatcacttgaggtcaggagttcaagaccagcctgaccaatatagtgaaaccccatctctaccaaaaatacaaaattagccaggcgtggtggcgcacacctgtaatcccagctacttgagaggctgaggcaggagaatcgcttgaaccagggaggcagaggttacagtgagccgagatggcgccattgcactggagttgttacctgggcaacaagagcgaaagtccatctcaaaaaaaaaaaaaaaagaatcaagaaagaagaagatgctaactcaaagagcgccaccattctgaatgcctagatacctaggcattcagaatgcacagcctgtttcaccactgcctggctaatcacgaactggtttccatcagctgctaaaagccaacaccaattagactgaaaatgcctctctctccacttgtttaacaaaatatcctctactaataagcaatagattcttgttggtttcaaatactcaagggccacacatttttaaaattctgatatgctcaaagtatattctaagtgtttaaggttgttcttgtcagaattgaatttgtcacacaccactttttgtttttactagctcccagcagatacccaatacatgttaactgaaaaaattacaaatagaacctgtgaatcactacttgtctaacaaaggactttaacaaatgtgtatggaatgcttgatgtgcaccagaaactgaagccctggaaaaggtgagaaagcatgctgtttctggcctttcaagagctccccaagtaccagggaaccagggctctgctacaaatactaatatctaatgtaatagagtgagacttccactactgagcacaatgagggtgagggactgggtttaccctcctgcctgagacaaccaaagcaaaccaaaaaacaaaacagacaaaacccagagtcctcaagacactggacatgagcaatgaaggacagtgatccctgggagacgagagactaagtcagccctatggctgccccaactcgctgctttgagagagttcctaggctgtggcacaaggaggagggacaggcaaccctctgaattgaagaggtgctgagaatctaaggagaccaagacagccacagttcataagacagagcaccagagaagagaaaacaagacagagagagctctggagatctggggaaggtccctctcgagtactcagcagagatatgtgtgtgagaaaactccctgaggccagggaaagaagcattggaaaggattagaaggagcagagctcagcgctcacacagggctagaaagtcactgttctcagcaggcggactggaaaacccaaactttctggttcattaggtagagtactcaggatggtcttgcctcctaagcatggtacctaattattcctaaagaggaataattagtccaaaaaaaaaattagtcctaaactaagcactgctccaacccatctgacaaattataaagcaagacccaaaagagtaaaccatctatatgtaactcaactaacctcagaacaaagctcaagaagatctatgggaacacaaaaatatatagcatccaacaaagtaaaattcacaaggttgggcatccaataaaaaattggcagccatacaaagaggcaggaaaatacaacccaaaacgaggagtatcaatcaaccaatgagaaacaccaagaactgggaagttattagaagatcttagaactagcagagaaggatattaaaacagttattacaattgtgttcacaaagctaaacagaaacacagggagacatttttaaaagacctaaatcaaacttctagagataaaaacaaaattagtgatatacactgaacaggggccagacacggtggctcatgcctataatcccaacactttgggagaccgaggcggatgaatcacctgaggtcaggagttcaaggccagtttggccaacatggtgaaaccccatctctaataaaaatacacaaattagccaggtgtggtggcacgtgcctatagtcccagctactcgggaggctgaggcagaagaattgcttgagcctgggaggtggaggttgcagtgagctgatatcgcaccactaaactccagcctgggcaacagagtgagactgtttcaaaaacaaaaaaaaaaatacgctggacaggattaacaacagattaacagattaacaacagagtagacactgtagaagaaaagatcagagaacttgaaaacacaataatagaaactatacaaaacagaaaacacataaaacaatcaaacactgaaaagagcatcagtaagctatgggacaacactaagcaatcattcaggaaatcacagcccctttaagagagggaaaaaaggagggaggcagggcagaaaaaaaatctttgaagaaataatggcctagctgggtgcagtggctcacgcctgtaatcccagcactttgggaggcccaggcgggcagatcacgaggtcaggagattgagaccatcctggctaacacagtgaaacctcgtctctactaaaaatacaaaaaattagccaggcgtggtggcaggcgcctgtagtcccagctactcaggaggctgaggcaggagaatggcgtgaacccaggaggcagagcttgcagtgagccaagatagtgtcactgcactccaacgcaggcgacagagcgagacactgtctcaaaaaaaaaaaaaagaaagaaagaaagaaagaatggcctaaaattttccaaactttaaaaatactatgaagccacagacccaacctcaataaacccaggcacaagaaacacaagatataaaaaaactacatcagggcatatcattatcaaatcacccaaaacagacagtataaagtctgtcacccatgctggagtgcaatggcatgatcatggctctttgcagcctcaacctcccaaggctcaagcaatcctcccacctcagccccgagtagctgggaccacagacgcatgccactgcggccaactatttttgtttttctttttgtagagacagtttcccggtttgcagataaagtcttaaaccagacaaaacatataaaatggaacagtaaggagttacatgaaaaatcgtctataatataatgcaaaagaaaaatccaatgcataatacatttcaattatgtataaaaatgagtatggaataaataaggattagaagacaagaaaaaacattacctgtcaagaatgtggaattattattttttattcctagtgttgctatttagaaaaagaaaatgattctattttaattctaaagtctctgtgcctttaaatcctggaactaggtaaactcacagaagtctgaagaaaacctgctcatacccgtcgccacatcaagctcacctctccagctacacttgtgctcagacctcaacacccagccccgcacacatgcagaggcctatgcatgttggtgcaggggctctgatgccttcacctaagcaaggtcacagataaggctcaatagtttgtatatctcaagcctggcctgacaatctaagcatctggatatctttccagctgcctcagaactgctgtgtggcagaaagagatctgaaaccttgccatgctgtgagtcagtgagggagattcctcaaaacagtcaggggccaagtgcaaacaagaacctgtgaaagcttctaccctacatatccccctctaaaagaccacggataaaaactcaacaattaagcaggtgaggcttccaaagtacaaacaaaaggatatgcgagaaagctaaaatgggcctctgtcttgaaacagcaaaaaagatgaacttagaaaaacaaaaaaggagaggtgagtaaatctacctttaactgtaaagacacaggccagagaataagatgcttaattatccagttattcttatgccaaatgtaaaaattttcagagatgagcttattatctttatgtacctttaaaaatatatacatacacacacaaccatatggctgatttcaagaatataaagatcaactaacatcaatcttcattaaattgtgacttattaataatttacttttattatttggataaggcagcatttgatacattcactgactgtaactgaaaaacagccatttctatatatgacagtcataataataaggttaaaaaaaaacccacatacaaaaaagaaaatcttactatttaaagaatcccagttagatgatttttatttcagtataatctcacgttcaaatttaaaacatatagtattttccattttgctaaaatgtgttatacatggagactgctggccactaaaaactacttattaagcacagtggtttagggcaaagagagggagatctgaaaatatggctgggcgtggtggctgacacctgtgatcccagcactctaggaggctgaggtgggtggatcacaaggtcaggagttcgagactagcctggccaatgtggtgaaaccccatctccactaaaaatacaaaaaattagccaggcatggtggcaggtgcctgtaatcccagctactccggaggctgaggtaggagaatcgcttgaaaccaggaggcaaaggttgcagtgggccgagattgtgccgatgcacgtcagcctgggcgacagagcaagactccacctcaaaaaacaagggatgcttccaaaatggccgaataggaacagctccagtctacagctcccagtgagatcgacacagaagacaggtgatttctgcatttccaactgaggtacctagttcatctcactgggacttgctggacagtgggtgcagcccacggagggcaagccgaagcagggcggggtgttgcctcacctgggaagcacaaggggtcgggggacttccctttccaagccaaaggaagccatgagtgactgtacctgaaggagcagtacactcctgcccaaatactgcacttttcccacagtcttcacaaccagcagaccaggagattctctcctgtgcctggctcagcgggtcccacgcccatggggccttgctcactgctagcgcagcactctgaaatcgacctgggatgcaggagcttggctgggggaggggtgtccaccactgctgaggctagagtaggtggttctatgctcacagtgtaaacaaagcagcagggaagctcgaactgggcagagcccactgcagctcagcaaggcctactgcctctctagattccacctctgggggaagggcacatctgaacaaaaggcagcagacagcttctccagatttaaacatacgtgcctgacagctctgaagagagcagtggttctcccggtacggcattcaagctccgataatgaacagactgcctcaagtgggtccctgacccccatgtagcctgactgggagacacctcccagtaggggccaacaaacacctcatacaggcagacaccttcgtgctctgggacgatgtttccagaggaaggatcaggcagcaatatttgctgttctgcagcctctgctggtgatgcccaggcaaacagggcctggagtggacctccagcaaactccaacagacctgcagctgaggggcctgtctgttagaaggaaaactaacaaacagaaaggaatagcatcaacatcaacaaaaaggacacccacaccaaaaccccatccgtaggtcaccaacatcaaagaccaaaggtagataaaaccacaatgatggggagaaaccatagcagaaaggctgaaaattccaaaaaccagaacacctcttctcctccaaaggatcacaactcctcaccagcaagggaacaaaactggatggagaatgagtttgatgaattgacagaagtaggcttcagaaggtcggtaataacaaacttctccgagctaaaggagcatgttctaacccatcacaaggaagctaaaaaccttgaaaaaaatgttagactaatggctagaataaccagtgtagagaagagcttaaatgacctgatggagctaaaaaccacagaacgagaattttgtgaagtatacacaagcttcgacagccgattcaatcaagcagaagaaaggatatcagtgattgaagatcaaattaatgaaataaagcgagaagacaagattagagaaaaaagagtgaaaagaaatgaaccaagcctccaagaaatatgggactatgtgaaaagaccaaatctacgtttgattggtgtacctgaaagtgatggggagaatagaaccaagttagaaaacactcttcaggatattatccaggagaacttccccaacctagcaaggcagaccaacattcaaattcaggaaatacagagaacaccacaaagatactcctcgagaagagcaaccccaagacacataatcatcagatccaccaagattgaaatgaaggaaagggcagccagagagaaaggtcgggttacccacaaagggaagcccatcagactaacagcagatctctctgcagaaatcctacaagccagaaaagagtgggagccaatattcaacattctttaaaaaaagtattttcaacccagaatttcatatccagccaaactaagcttcataagtgaacgagaaataaaatcctttacagacaagcaaatgcagagattttgtcaccaccaggcctgccttacaagagctcctgaaggaagcactaaacatggaaaggaacaaccagtaccagccactgcaaaaacatgccaaattgtaaagactactgacgctatgaagaaactgcatcagttaacgggcaaaataaccaactaggatcataatgacaggatcaaattcacacatagcaatattaaccttaaatgtaaatgggctaaatgccccaattaaaagacacagactggcaaattggataaagagtcaagacccattggtgtgctgtattcaggagacccatctcacatgcaaagacactcattggctcaaaataaagggatggaggaagatctaacaagcaaatggaaagcaaaaaaaaagcagggattgcaatcctagtctctgataaaacagactttaaatcaacaaagttcaaaggagacaaagaaggccattacataatggtaaagggatcaattcaacaagaagagctaactatcctaaatatacacgcccccaatacaggagcacccagattcatgaagcaagttcttagagacctacaaagagactcccacccggtaatagtgggagactttaacaccccactgtcaatattaggcagatcaatgagccagaaaattaacaaggatatccaggacttgaactcagcactggaccaagcggacctaatagacatctacagaactctgcaccccaaatcaacagaacatacattcttctcagcaccacattgcacttattctaaaactgaccacatagttggaagtaaaacactcctcagcaaatgtaaaagaacagaaatcacaacaaactgtctgtcagaccacagtgcaatcaaattagaactcaggattgagaatctcactcaaaaccacacaactacatggaaactgaacaacctgctcttgaatgactactgggtaaataacgaaatgaaggcagaaataaaaattttcttggaaaccaatgagaacgaagacacaacataccagaatctctgggacacatttaaagcagtgtgtagagggaaatttatagcactaaatgcccacaagagaaagcagaaaagatctaaaattaacaccctaacatcacaattaaaagaactagaaaagcaagagcaaacaaattcaaaagctagcagaagacaaaaaataactaagatcagagcagaactgaaggagatagagacacgaaaaaaaaccctccaaaaaaaatcaatgaatccaggtgctggttttttgaaaagatcaataaaataggtagaccgctagcaagactaataaagaagaaaagagagaagaatcaaatagactcaataaaaacgataaaggggatatcaccaccgatcccacagaaatacaaactaccatcagagaatactataaacatctctacccaaataaactagaaaatctagaagaaatggataaattcctggacacatacaccctcccaagactaaaccagaaaaaagctgaatctctgaatagactgataacaggttctaaacttgaggcaatagttaatagcctactaaccaaaaaaagtccaggatggattcacagccgaattctaccagaggtacaaagaggagatggtaccattccttctgaaactattccaatcaatagaaaaagagagaatcctccctaactcattttatgaggccagcatcatcctgataccaaagcctggcagagacacaacaaaaaaagagaattttaggccaatatccctgatgaacatcgatgtgaaaatcctcaataaaatactggcaaactgaatccagcagcacatcaaaaagcttatccaccacaatcaagtcagcttcatccctggaatgcaaggctggttcaacatacgcaaatcaataaacgtaatccatcacataaacagaaccaacaacaaaaaccatatgattatctcaacagatgcagaaaaggcctttgacaaaattcaacagcctttcatgctaaaaactctcaataaactaggtatcgatggaacgtatctcaacatagtaagagctatttatgacaaacccacagctaatatcatactgaatgggcaaaaactggaagcattcccttcgaaaaccggcacaagacaaggatgccctctctcaccactcctattcaacatagtattggaagttctggccagcgcaatcaggcaagagaaagcaataaagggtattcaaataggaagagaggaagtaaaactgtccctgtttgcagatgacatgattgtatatttagaaaaccctattggttcagctcaaaatctccttaagctgattagcaacttcagcaaagtctcaggatacaaaatcaatgtgcaaaaatcacaagcattcctatacaccaataacagacaaacagagagccaaatcatgagtgaactcccattcacaaatgctactaagggaatgaaacacctaggaagacaacttacaagggatgtgaaggacctcttcaaggagaactacaaaccactgctcaaggaaataagagaggacacaaacaaatagaaaaacattccatgttcatggataggacgaatcaatatcgtgaaaatggccttgctgcccaaagtaatttatagattcaatgctatccccccatcaagctatcactgactttcttcacagaattggaaaaaactattttaaacttcatatggaaccaaaaaagagcctgcatagccaagacaatcctgggctagaagaacaaagctggaggcatcacactacctgacttcaaactatactacaacactacagtaaccaaaactgcatggtactggtaccaaaacagatatatagaccaatggaacagaacagaggcctcagaaataccaccacacatctacaatcatctgatctttgacaaacctgacacacataagcaatggggaaaagattccctatttaataaatggtgttgggaaaactggctagccacatgcagaaaactgaaactggaccccttccttataccttacacaaaaatcaactcaagatggatcaaagacttaaacataagacctaggaccataaaaatcctagaagaaaacctgggccataacattcaggacataggcataggcaaagacttcatgtctaaaacaccaaaagcaatggcaacaaaagccaaaattgacaaacgggatctaattaaactaaagagcttctgcatagcaaaagaaactatcatcagagtgaacaggcaacctacagaatgggataaaatttttgcaatctacccatctgacaaaagattaacatccagaatctacaaagaacttaaacaaatttacgaaaaaaaagcaaacaaccccatcaaaaaatggacaaaggatatgaacagacacttcgcaaaagaagacatttatgcagccaacagacatacgaaaaaatgctcatcaccactggtcattagagaaatgcagatcaaaatcacaatgagataccatctcacgccagttaggatggcgatcgttaaaaagtcacgaaacaacagatgctggagaggttgtggaaaaataggaacacttttacactgttggtgggagtgtaaattagttcaactattgtggaagacagtctggcgattcctcaaaggtctagaactagaaataccatttgacccagcaatcccattactgggcatatacccaaaggattataaatcattctacgataaagacacatgcacatgtatgtttattgtggcactagtcacaatagcaaagacttggaaccaacccgaatgtccatcaatgatagactggattaagaaaatgtggcacatatacaccatggaatactatacagccataaaaaaggatgagttcatgtcctttgcaggcacatggatgatgctggaaaccatcattctcagcaaactatcacaagatcagaaaaccaaacaccgcatgttctcactcacaagtggaaattgaacaatgagaacacatgggcacagggaggagaacatcacacaccggggcccatggggagtgaggggactgggggagggataacattaggagaaatacctaatgtaggtgatgggttgatgggtgcagcaaaccatcatggcacgtgtatacctatgtaacaaaactgcacattctgcacatgtaacccagaacttaaagtataataaataaataaacaaatataaataaaactgaaattagccaccaaaaaaaagaaaaagaaaatctacgagacttttaactcaggctctgccgctgactttctgtgagataagtcagagactatctgtgtcagagaatatgactgtcaaccccagctctgttacttcctcaggcacaaaagagcaagtcacacctcccgccccgcccccttacccgtctgttttgcccctttccacttgaaaaggtcaagttaagaaataaaggactctacaaacacattttgaaacccactgattttccaaactaaactgggtctaagctaatacatgataacagacaaaaatagaatacaaatagaaacttccccctaaacttcatggctaaggcagagtcagacttgggtcctgtgacgcaagcacgtggggcagggaggagtctcccggaggcaccctggagaaccaggctccatcctagatgaactcagcccagaagacgcacatcaagtgtgccagccacaacccaaggagaaaaaacaagacacaaaccttcccaatgtcctgcagtgtggccagctctagtatctgagaaagaacatccaaggctgagcggagaaaccctccaaacttttccgtgctgttctgaagatccagcgtgaccttgggaaggtgaaggagagaacacacggttactggccctgtcacgatctcataatgtacaaccaaagacacaaacatcgacggctgcagcagatgcctccactgtgcggcgccgtacactcaccttgcagggtgtgtctgcgtgtttgttgtcagcactggaaaaatattttggaaagaaattcctttcagatagctatacaaaaactactctttcaaaggctttcaggttacactggcgctactggaagaaataattcctaactttctttcataatgagaaaaaagggttaaatgtccatcataatcagtatctggtatgtggtatatcaaaaaatagaaaatactaagtcctattccttatacactaggatccctgggagaaatcactgtcaaattcacatagggttggttcaatttggatacaataaaatattaaatcaggtgtaagatgtgttaagattctaaaggatttcatgtaattaaattatacagcaattctattttacagactcagagaatgggtcaggaccaaagacatgcataacaagaaaggtaaggcgagactgactaggaaaataaatattggtaaaacactgcctcagaaaagaaggtgctcagtgaacataaatctaagaacccttgtgaaagagaagctttctctgggcgaagtcagaagcaggcaagagacagacacagaaactgaaaatgtgagtggatctaaataccatgactacgctagtcaacctgggtgtgccctaaggccagccaaaggaaagaaaaatccagcagtgacaccactgagggtccaaggaacgaggtgatgtggtgatgtcatgtgagatgaagagcccagggaagaaagggttctcctccaatatgcacagcaatctgacctctcctggacaacaggtaagtgggagggaaaagaaggcatggaattctggaaagagaagttcaccatgggaagttctagctctcaaagaagggaaaagaggtcatgagatgagaattaagatgaaaaagcttccaggtcttcagaagagctgcaaaagttctgtggagactcgaaaccaaagcaagaaaccagggaagacaaaaggaatcagaggagtgcaggaagggccacacaagaaatggggagtggagacgctgagcaactcagcagaaggaaccaaggaaaccagaggcaatactcaaagatccagcaagacacgccaggcactccaaacgcacttcagctgagaagctgcgcagcaggagctgaccgcggggatgacagagcaaaggaaacaggagtccaagatgccagggaggccagaattacagcagaacatgctggagttcagggtattcaggaaggaaaataataaacagatagcaagcactaggagcatggaaaggtgccctgaaattcaagatgatatgagttgaaaacaggtggaaaagaagtatcttctctacggcatttttcaacatgccgtcttctgctttgggagctgacatgagaaccatgcagcttaaagagacctcaaaccttgtaaaatatgaagactttcatatcttccaaaattatcaaacatccttcagaaaataagccacatacgtttgataaatgattttcaggggaaaaaaaacccataagaagtaactattagtaacaaaaacagaggaatacctgaggattcatttatcaagaaatgtgcaagagctatgtgaaataatctttaagttttttttaaaatcctttaaatttcatgtgcttctgaggtaatttaaaaagttctgaacaaataggaaagcatcccacattctggacagggtgacttaacatctgaggtataagttctccctaaatcaatctacaagtagaagttgattctattgttcacatcccaaaatcaataaagaagaatatccagaaaattctaaagaacaacaggggaactgatcccctcataaataccattaagctacaataattaagaagtatacttgtagccgggtgcagttgctcacacctgtaatcccagcactttgggaggccaaggagggaggattacttaagccaggagcttgagaccagcccaggcaacttagggagaccctgtctctacaaaaaatgtaaaaattagctgggtgtggtggcacatgccggtagtcccaggtactcaggagctgaggtgggaggatcacttgagccctgagactgcagggaggcatggttgcaccactgcactccaacctggggacagagcaagactctgtctaaaaaagaaaaaaaaaaaacaaggatgcttctaatagatgagcagacagatagattgatataacaaaataataaatgaaactactgaaactagagaactatgagaatgtaagtaactcaagccaattagtgcagaaaaattcttctgtaaacattattggggacaaccaaaaacaaaaattaaattagacacatacttcatatctaacaaattgcagatgaacagaaaattttaaagttaaaaaaaaaaatgaactaaaaaactaaaacatccctagacagaaaggctggctcttgggggtatctggtgaacagtttcttacgctgacataaactttccctagctgataacaagtggctcaccatgcccagactatttgaaacacatggtttatgccgaacacctgcttttcttctgtgagtctggaattgtggctcatgttaggcagagggtacctgcaggaccagcatgttgctgtatttttgtgtgagcctcacgggagggaaggaagcctgtacacggatccctccagactccaccagggccacttccccctataacctggctgcacatcctagctctgtcactgtaatcaatcttagctgtgagtacaaacaatatgaaaatccaaaacacctgtatgatagaagctatcataaacaaagctgaaagacaaacaaacttgaaaaaactaaatgtaactcatatctcaaagggcttatacatcctacaaatcataagaaaaacatcaactatccattagacgtaagtatgtgtgcatatatatttttaaaagatgcagaggcccataccttgtagttagcgtgtgtagctttcaggacatcatgcagtttgaggtatgaaggaagatgatagaaactccccagtgatgaggatttacttgttgtaacaggacctgaggtatcagattgtctagaagctttaaaaatatgcacacaaaagataaacttttagatcaaaataacttgccaagttttaaagagattactggaaatcatgattttttaaagtattctagtatgaaaatattcaagtatttcctctgaccttttgattaactagaagtaatgagaaattgactaacaaacataagtagagcctaagtactttttaaataacaaaataagaagagcagtgtgcacagttgttttgttatgattgcttgtttgctttgtgagaaatcagttagagaatcataggagcagctgattcaaggaccactggccaattccagaacctctctgagcctaagattccttagtggccaacaacttcatgagcacaccaagtaatcaaacagggatgatgtaaaaatgttttaaagacggcaaaggcacaaacattatcattaaaccgatactaaatattaaagtgccaagcactatatacaactattctacttcagtttgaagacttttgacttggagtccttagtttatttaattcatcagaaagatgatagtaatatactgataattttacacttgtaaaggctgaggcttttcaacaggtcaatcttcctcctgtactacagtcaatccttagaaaagagcatcttttaaaacgcttgaggccgggtgcagtggctcacacctgtaatcccagcactttggcaggccaaggcaggcggatcacttgaggtcaggagttcgagaccagcctggccaacatggtgaaactccacttctactaaaaatacaaaaattagccaggtgcagtagcatgtgcctgtaatcccagctactcaggaggctgaggcaggagaattgcttgaacctgggaggcggaggttgcagtgagatgagatcgtgccatggtactccagcctgggtgaagaagactccatctcaaaaaaaaccttgaatgtgttggtcaaggatacaaaatttcatttatagacaggaggaatgagttcaagagatctactgtatagcatggtgactgcagttaatagcaatgtaccatatgcaagaaaatcactgaaagagtagattttaagtgttctcaccacaaaacaatgatacgtgaggtgatgcacaggttaattagccattccacaatgcatatgtatttcttcttttttttttttttttgagacggagtctcgctctatcgcccaggctagagtgcagtggcatgaactcagctcactgcaacctccacctgccagattcaagcaattctcctgcctcagcctcccaagtagctgggacgactggcgcgagccaccatgcccggctttttttttttttttttttttttgtggtatttttagtagagacaggatttcaccatgctggccagtttggtcttgaactcccgacctcgtgatccgcccacctcagcctcccaaagtgctgggattacaggtgtgagccaccacgcctggccaatgtacacatatttcaaacatcatgttgtatattacagatatatacaattttgtcaattaaaaataaataaataggccgggtacagtgactcatgcctgtaatcccagcactttgagaggctgaggtggacggatcacgaggtcaggagatcaagaccatcctggccaacaaggtgaaaccccgtctccactaataaaaaatacaaaaaattagccaggtgtggtggtgcacacctgtagtcccagctactcaggaggctgaggcaggagaattgcttgaacccaggaggcagagcttgcactgagccgagattgcaccactgcactccagcctgggtgacagagtgagactctgtctcaaaaaaataaataaataaaataaataaataaataaatagccttgatataaatgctatatacacaaaacaaatgggagaaccatcactggcccctgggtgccaagagacagcgtgagaatgggtctggagggagactgtacagacaggtggccaggcgtcccagatagcagaggcagcagcagtcacttcatgctttgccaggctcctctcctgcccctgccactgcccaccgagagcagtatggatgggaattcaataaactgcagtcacacctaaatcctagccccttctgttctgaccttttcatgggtaaaaaaaggtcctccaaacttgtgaatggtttaagctcctccaactcagatgactttatccccactttctctcgcctttagctcttccaaatgtaaatattccatttccaatcagaatttttgacatatcagaatcagttttttcactcactacatctattcctaagcatctacaccacttcccttactgaaaatcaggaggcctctccagccatcacctgcaaccagggaagcataggagagtgatgctccatgctagggctggaagcctggaggctgtaggggctgcatgtcagccagtggcacttagaaatgcttcagaccaaaaggtggtctgtgtacatcagtcattagtttctaatatcttgaaccgcacctggagaaactttctctcactttactgatgtgtattatatttatttctctaaaacaccaagttacttaaatcctatgtttctacatgacagatgctgcactcatgtccctcccttccccacgctgtttcctacctgcactggcctcactgcctttcttgggactcaacggtacagatgcttgttctcctggttctttctccttcccctttcgtcggatgggacttagagaaggggggtttgttagagaaggcaaggctgcctaaaatagaaaaacaaaaacaaaaaacaaaaaaacaaaaacatgtgatggaagtataacaaaactgaaaattagaatatttggttttaccatttattaaaaagagctaacccatgtcactcattttgttcttggaccctgatatgtacagttcagacactgtacacattttatttacttttacccacacaatgatacatggtagggactggcccacaacttcctaacaggtgcacagagaatgagttgaagatggaaggagccctcagggagcccccaggcccatgccctccaacagcaaacaaccagggcattctatgttggccatgacgccatgacatgaaaggggtacaaagcagcattttttttttcttttttgagacagggtctcactcgtcacccaggatggggtgcaatcatatttcattgtagcctcaacctcctgggctcaagcaatcctcccacctcagcctccagagtagatgggaccacaggcacacgccacatcacccagctaattttttaatttcttgaggagacaggatctcacactatgatgcccaggctggtctcgaactccaagctccagtgatcctcccatctcagcctcccaaagtgctggaattacaggcatgagccaccgtgcccaacccaaagcagcattttaaactcctgtttctaaaagaggaaacaggctcagagatgaagtaacttattcaaggtcacagctggttaccagcaaagctagaagtcaacaaatccagatgtattcataaagcctcaactatctccaatacacaacacatgagagcatatagaacatcgagactcccaatgctctaggaggcagccatcatggagcagagtgaaggcaagatgactgacatgtggaattgaggtcctagctctgctacttactcactccctgatcttagaaaagtgcttgttatggtttcaatgtctatagtcccccaaatttatacactgaaacttaattaccagggtgatggtattaggaggtggggcctttgggaggtgactgggtcatgagggcagacccctcatgaatgagattagcatccatatataagaggccccacagagcttcctcaccccctcaccacatgagggcaaggcgaaagtcctggatcttggacttcccaacctccagaagtgtgagaagtaaattctgttgttgaagccacccaggctatggtattttgttatggcaacccatgctgactaagacagtcaccttaaaccataataggatgaatggctacaatcgggtgcatggactggaaggcatcagggaagaaatgcagacagtaaatgaaaggttagccgggcatggtggctcacgcctgtaatcccagcactttgggaggccgaggcaggcggatcatgaagtcaggagatcgagaccaccctggctaacatgttgaaacccatctctactaaaaaaaaaaaaaaaaaaaattagccaggcatggtgacatgggcctgtagtcccagccactcgggaggctgaggcaggagaatcgcttgaacccgggaggcagaagttccgtcacaatttaaaaaaaaaagaaaaacagagaggctgctacactgaaaaccctgcttggtagaaggcaccagtcacaagctcactgactgtatgagcccatccacagtaatgtccagaagacgtagagtcacagagacagaaggcaggttagtggctgcctgcagctggaggcatggaggttttgggtaaagagtacagagttcctttatgggttctaaaactgattctggtgatggctgtacaactctgtgggcatactaaagagaatgaattatatactttaaatgggtgaattatatgaattatctcaagaatgctgtttcctggctgggagcggtagctcacgcctgtaatcccagcactttgggaggccgaggcgggctaatcacgaggtcacaagttcgagaccagcctggccaacatggtgaaaccccgtctctactaaaaatacaaaaagttagctgggtgtggtggcaggcgcctgtaatcccaactactcgggaggctgaggcaggagaatcacttgaacctgggaggcagaagttgcagtgagctgagatcgcgccaacccactccagcctgggcgacaggctgagactctgtctcaaaaaaaaaaaaaaatcaaaaaattagctgggcatggtgggtatgcctgtagtcccaactactgagaaggctgaggcagaaggatcacttgagcctgggagatcgaggccgcagtgagctatgatcatgacactgcactccaagctgggcaacagaatgacaccctatctcaaaaaaattaaattaaattttttaaaaaatgctgtttccaaaacaaaaggctagtgcagtaatccaaatgagatagtatatcagtctggaccagaagtggcagagaatataaagtatgcatatgtacatgtattatgtgtccatgtacaggtgcatgcatatgtgcagaggtccccaaactttttggcaccagggaccggttctgtggaagacaatttttccacaaaccagggttggcgggggatggtttcgggatgaaactgttccacctcaaatcatcatcaggcattagattctcataaggagcatgcaacctagatccctcaaatgtgcagttcacaatagggttcatgctctgatatggtttggctctgtgtccccacccaaatctcatgctgaattgtaatctccagtgtcggaggtggggcctggtgggaggtgattggatcatgggggtagtttctaatggttgagcaccatccccctggtgctcctttgtgtagcaactccccctacaggcactctcctttctccctcctctctccctctcaatctttctttttctctctctctctctgtctctctctctctctccttctctctttttcctgtgggccatgtgaagatgtgcctacttccccttcaccttctgccatgactgcaagtttcctgaggccttcccagaaacagaagcctgtacagcctgcagaactgtgagccaattaaacctcttttctttatatgtctcaggtatgtctttacagaagtgtgagaacgaactcatacacgctcctatgagaatctaatgccaccactggcctgagaggagatagagctcagatggtaatgcttgctcacttcttcctgtgcagcctggttttttttttttttgttttgttttgtttttgagacagagtctcgctctgtcgcccaggctggagtgcaatggcacaatctcggctcactgcaagctccgcctcccaggttcacgccgttctcctgcatcagcctcccaggtagctgggactatgggcgcccgccaccacacccggctaatttttttttgtatttttagtagagacggggtttcaccgtgtgagccggaatggtctcgatctcctgaccttgtgatgcactggtctcggcctcccaaagttctggaattacaggcgtgagccaccacgcacggcctgcagtccggtttttaacagaggttggggacccctgcatatgtgcatgtatatgtgcatgtacatgtatgtgaatacaaaggtacacactttcttctcgcaaaatatttagtaggggaaacaaaagacttggtgagtggaaatgaagacttgtggtgacctgtttctagcttgataagacacaaagtggggtaaatggggcaggggcagatgtggggaggaggacagaaagctgagctcatcacaccgtgtctgacatatccacaaatcagctatatgtaagtgtcacggggcagctggctacattgaactgcagctccagagacaggtcctctgaggtccctcatctagacactgaagacaggagaacagccccgactctcaggctgccctgcccaatactggagccactacccacataaggttatttaaatttaaatttaatgaaaattaaaccgaatcggggttcagttcttcagtcacactagctgcatttcaagggctcaacagctatatgtgtttagtggctactgtcttgcctggcatagctatggagcactgccatggttatagaaaattctgccactctctagaacagcactggcccagagactacaaagagagaagacggcctaggacagagcctagaaagcatgtgctggtgggcaggaaggactgaacccagtgactggggagtggcaagtgggtaagggaacacccaggaggccctctgaaagccaactgaagaggacactcaagatgggggtagcagcctgcaggatacaaagagggaaaggcaggcaggaccagagcagtgcccagagatgtaaagacatgatctgggcgggaaacgctgctatggagtgtggcaacagaaaccaccagcaggggttaaggaaggatggctgaagtagtagacagggtccaggccaagagagccaaagaagccttgcaaacaaggtccacctcagagcagtgggaagctctgtgggctgaggctgggactctccagagatgtttgcagagaagggagaagactgatggcagctaaaggagaatgggaagttagtagggagatttttaaaggtagaagacaaggcaaagagagagtaatcagatataaacagtaagtgaactggtctatcttaggctgggcgtggtggctcatgcccgtaatcccaacactttgggaggccgaagcggatagatcacttcaggtcaggagtttgagaccaacctgaccaacatggtgaaaccccgtctctactaaaactacaaaaaaattagctgggtgtggtggtgcatgcctgtaatcccagctgtaatctgcctcgagaggctgaggcagaagaatcgtttgaacccaggaggcagaagttgcagtgagctgagatcacaccattgcactccagcccaggcaacaagaatgaaactccatctcaaaaaaaaaaaaaaaaaaaagtatgtgaactggtctatcttaaatccattgtacaaatagttaacatttgttttgaagttgattttattgcttcacagaaaagcaaaactgtccctgagattggcagaacattctacaaccatggaaatgctccataactatgctagccaggacagtagccattaaccaagatttaaggagacagcaatgaggtacttggccaggaacatcaattctgagctttcttggctaatgctggaaacctaaaactaaagctaggtatttccctcttagggataacagtgactgatgatactaaaagagctataaaacacatggtcacatttttttcttcttttggaaagagtctgactctgtcacccaggctggagtgcagcggcacaatcaaggcttactgcaaactccgcctcccaggttcaagcaactctcttgcctcagcctcccaagtagctgggattacaggcacgcaccaccatgcccatctaattttttttttgagacggagtctcgctctgtcacccaggctggagtgcagtggcacgatctcggctcactgcaagctccgcctcccggattcacgccattctcctgcctcagcctcccgagcagctgggactacaggcgcccgccaccatgctcagataatttttttgtatttttagtagagacggggtttcactgtgttagccaggatggtcttgatctcttgacctcgtgatccgcccacctcggcctcccaaagtgctgggattacaggcttgagccaccacgcccggcccaacccatctaattttttgtatttttagtagagagggggtttcgtgatgttgcccaggctggtctcgaactcttggcctcaagtgatccacttgcctcagtctcccaaagtgctggaataacaggcacgagccactgcacccatccacatggtcacattttgatgttaaatttagtgtcacaatctgagcaattttgttcatttaaagcaaaaagagaataaagaagggacagattactaaacaaaggtagtctggaaacccatagtcattaaggctgtatgaatccagcacccaagtgggacattacctttattgcgggtccaggagccacgtcatccaggacgtgggcacaaatgttaatcaccttcagcaggtgagagaagagctgctccaccatgggcaccagggcccggtcccccagggctggccagacctcctcttgcttggtggctgctgggttggcttcttcttcagaggcccatgaacttctcagagatttgggagcactggctgtgatatgggcacagacattacctctccaccccaatagcatgggaaggacaaattgcttggggaactgaagtcatttaagaccctatgttgagagttggccagacatctgtgcctgatattcaactgataagccaaactcaaactgaaactgatgtttcccgcacaaatctgtgttcccaatttccatgactgtcaccaccacacacctgcccaggatgtgaagtcatcccaggtttctttgtcttcacaaccgaagttcagttggtgaaccaggcctggcaattctgcctccttcattctcttacaatcagtgtcttccctacagtcccaaagccattatcttgccttagcatcaacattaatctcctgagtctccctaccttctcctccagcccatgttcaagttggatgaatgatcttattaaaatactcatcttttagtccctttcacgaaactctcctatagccccctgaagcaaatagcacaggccccaattctttcatggagattggcaacttctcccaaaatcaatttcaatggactccgtcttccttgctggccacatcctccattatcatcgccaaggtgctacaccctctccgtgttgtgctctttcctaccagcccataaatctgcccaaggagagtgattagggccactctgtgtgaccactgcacttttgtttacgtgtatccccctctaatctaaaactaacttgagaatgaagtccatacattatactttcttaacatcccagtgcccgagggagtactggcatatggtgcccattaaaatgaaattcaaaatgagtttacttgtagttaactgaggggctatattgggaagaggctactttaaaatactcagcacagaacagctgccaactgcatgtgtttatgcatataggtaacatctgaaatttgactaaagggacaagccatcactggcaatgaccttatagtattttcccctcatatgctcaccacccccattccccctaaggaaatcaaaatccaagtcctggagtccctgtttcaactcagtaccagtacctgcaagcaagtttccggccaaaatcaaagcatcttgatgggctgagagatccaatgggaaccaagctgacgagagcagggtcagaatcattgtggccatcccaacggtacagctcttcctagactcatctgaggcactcagtggaggcactctggaagcagacatttgcaaagtcaaattatagacaatttttaagcaaacaacagtcttcctttctcttgcaattccaagaggaaggcatgtcacaatacattttataccagctcagaaattgttttatttttaatcaactaacatctttcctataaatcagagctccataaaaatcatttgagaaatgaaatcaggtagtagatctgaatgaaagtattggggcctaagtgtccaatgaaggaatgcttttactagggcatatgacaatggttctgctgaactggagatgagacagctacccagacatttgggcatgttaatgccattgagtaaacaggcacaaaataaaagagaattggctggggtgaactctttattactatggaaaaatagtgtacttgatacacaatggggcaggtctgacgtggttagttttcctgatattattatgttggttccccaatggtatcctttaacacgccatatcttgtagtaaaagttattgaaagacaaattgcaacctcaaataagcaggactacccagggctcaatcccctagaaaagacagtgtaagtcaaactaccaagcattgaactccaaccacctgaggtgctgactgagcattaagagaacatagaatggatatggagaatagaactcataaatatcaaccccttgtgaacagatgcagaaacgaggattatggtgtctacccatattttcttttttattttatcatttaaatctatattttaaattgtaaaaagtattagaactgtatgtttacttgaacggatttttaactttctttaaattaatacattttactccaatgccaaagttgcccagaagtgaagtctagtgccagacctatgattagaaaccgtagctgctcagtctgtatgtgaggaaggtgggaaagcaatcattctagagcagataatgtaatccacttcaagcaaatatcagttggtcatttgctgacacacacaagaaatctgcaggtttacttctcaaatgtgatgtgagtcaccaaaatcattctcagtaattgatacacaaaatgaaagcctattcctgaatgctggagaagacttgaaattatttcccagatgctagtagggccatctactggaggaaaatcatttttaaataaaagctgttaatacaagaacagtagttcctaaatcatcaccatttcgtatgctaggtcacaattaagtgaaaaaaggttcctaaacttctaattcacagcaaataattttggaaagagtcaagctaatgagaaaagccttttgccagcatatgaaaattcccttaaatgaacttgaagaccacaccctgaaattcccatcaatgcctaagaacatttggcattcatttcccacagctcctgtcactagtctcacacagctaatatagcagaaacaagtattccatcagatatttttccaaaaagccaaattgataaaagacttaaaaagaaagaaaaagggcatcctaataactatgtttatgtcatactgttgtagacaactattaatatatactgaggaaaatacatacccacagtgccaacctaaactccaaatgcaaactgggaaggcagtggaaagaagacacaaagcttcacagcatccaaactgagaagaaagaaacaataaaatcacacccaaacaccacaaaggtttattgaattatatctcctgttaccctttataaaaagtacaaacaatgagaagaaaactgagatctgtgtatgataaccacaggatatctgtcccaccatggtacaacttcctactttagacacctcaaacacgtgttatcagaatggcaattatatcccaatgaagagaggttcctgtgctgcccacaccctggaatgatctcccacccttccgcctctcaactgcccctgcacatccttaggagctgagctccagcttaccacatcgtctccctgaccagcctgcagaaaccctaagggcaggaatcctgtttttccatcccaagcctacaacagtgcccgacacagtcggccacaataaaaataaataagcaaagtttacgatattttgaacaaatcaagggaagaccatactgcagacagcccaaacaatatttagtcttctataacatggaagtatttcttttgtcaaataaaataaaaaggtctggctgggcgcagtagctcacgcctgtaatcccagcactttgggaggccgaggtgggtggatcacgaggtcaggagttcgagaccagcctgaccaacctggtgaaaccctacctctactaaaaatacaaaaattagccaggtgtggtgccacacgcctgtaattccagccactcaggaggctggggccagagaatcatttgaacccaggaagcggaggctgcagtgagccaagatcatgccactgtgctctagcctgggcaacagagtgagattccatctcaaaaaataaaaataaaaaggtttaacctggtcaccagcaaattaacattacttttgtatattatttttttctgataacaaaagttatacttgctcattttagaaaatttgagaatatctgaaaaatataaagaagaaaaaaatcatccacaatcccaaaatttatcttggtgattatctgccagtgtgagaaatgtatatatgtaaatattatttttcttaactgaaatccgactatacccccaccaggtttgtattctgccttttttcactcaatattacaatccagattatacatctccatattgttaaaaattctccaaagcatcacactatatactagcatatgtacataatttaattattcttggattcttggatattatggttcttttctaatgtcagcaacataaattcttattataaaaatgtaaggccaggcatggtggctcacacctgtaatcccagcactttggggggtcgaggagggcggatcacctgaggttgggagtttgagaccagcctgaccaacatggagaaaccctgtctctactaaaaatacaaaattagccgggcatggtggtgcatgcctgtaatcccagctactcaggaggctgaggcaggagaattgcttgaacccgggaggtggaggttgtggtgagctgagatcatgccattgcactccagcctgggcaacaagagcaaaactctgtctcaaaaaaaaaataataaaattaaaaaaataaaaatgtaaaaatgtaaattataaatatttttcccttagtatatattaccaggtcactgagttaattataatctagacattttaaacttctgatacattaccaatgcaggtgacagtagtttacttttttcttttctttttttttttttttttttgagacagagtctcgctctattgcacaggctggagtgcagtggcttgacctcagctcactgcaacctctacctcccaggttcaagcgattctcctgcctcagcctcctgagtagctgggattacaggcgcccgccaccacgcccagctaatttttgtatttttagtagagatggggtttcaccacgttggccaggctggtatccgactcctgacctcaagtgagcccccaaccttggcctcccaaagtgctgggattacaggcatgagccaccatgcctggcttattttaattgttgtgtcttcctaaattggctgaatttttttattttgggcgtgtattactttaataatcagaaaaaacatagtcatttacattcctggagtaagctgagattcttttcacagaagcacaatttcttagcaagcctcatggataagtaagagctgtaagacaagcacctcaccgtaagatgaccatacaactaactggccatacaagctaccaaaaactattacaatgtcagtaagaccgatcaagaaagagacttactgtgagtgctctggtggttgatgtgattagttcatgagaaactgctgcaataactcttgaaaggttattttccatagtgacgtctgttatgcttggtagtaggttatagcctctatatattctaataacaaaaatatagagacttaaaatacactattaaaacatatatttttaaagatcaaatggcatttaaaagtttaagattaaagattaaaaaaagttaagcagtctcaacttttaagtgaaacgggctgaaaataaattttgatcattattccataacaatggctgaatttattccctcccttcctcccagtctgccccgaacacttttgctgcagccatactccccttacagcgttgcctactatctgtttaagttgaaatacatgcttcatgaagttattcctgcttccaagaaaaaagaaattcctttctccacttctcatctcccacggcacttttttgcattcccttcatggcacatgtcaatttctatcccccattatagttatatacaaactctaattcctttagaacacatggaaaaaaggcaaaaaataaaataaattataaatgaattataataccccagtggtttgaataaagccaatctgattttgtatccctcacagtgtcttgtccacggagacactcaacaaaactaaggagattatgattttaagttaacacatgaatgctaacagaataggcagctaagcagcacactctgctgcacaattggtcattgtatctatcacgcaagacccaattgaccacagctgaattgtcaagaggcctgctgaagtttggaactgggagacttttccaagtagtagttagtaatcaattttaatgatatctcagttggcatctattaataaatattcatcttctgaaatgacattaagaagcaacaatttattctaagcttatcaaattcctgataatcaaatcctctttcactgcttctacttatcttaaaggagtatttgtcctgaatcttctccaagagagaaaatgccagttctgagtttaaacaaaggaaattatctgaggggaaatattaaggtggccaaaaaaatgtctccatgttttttttgtttgtgtgtgtgtctttttttgagacagagtctcactctgtagcccaagctgggagtgcaatggcacaatcttggctcactgcaacctctgcctccggggctcaagtgattctcatccctcagcctcccgagtagctgggattacaggggcccgccaccacgcctggctaattttttgtatttgagtagaggtgggttttgccatgttgccctgggtggtcttgaacccctgagctcaagcgacctgcccacctgggcctcccaaagtgttaggattacaggcgtgagccaccgcacccagccttccatgtgttttttaaagcagtctttacatgaaaaaagacgttatttattcaggaattatgactttgatatttgataagctgagttcctaattcagaaaaaaagcatcaagtgatcatttaagcttagaagtcatttagtccaagttttgtaaaacactgttactcagcagaaaaaaagagtatcatataaagccaatttttaaaataacatttaaaagacaaaattaaaaagcacaagtcttatcacttctgcaatcttctctgcaagctagaattctgaagattatagcttcattaaagcactgtgtcccactcacctaagaagcagataagaatgggatatatgtggccatttgacacgatattcaaaagctccacaataaatgtgaatgataatctcgcaaatcactgaactagtggataaccctaaataacactgactttaatagcccgctcaccaaaaaatcaacaggcatgatagaatacaatcctctttaaaggtaacacaactaaagtgaaaatgttttaacagataatacgtaagtgtcacaaacaaaaatacaactgtcagcacatggaatgtaataaactattaagagatttacagtgtcacagctgagtgattgtggcagagcttaaatacagaggtggtgtggtcaatcctcaaaatgataatatcctatcaaaggactgacctacactcaaacatcctgagctgaagcttttttctagaaaataaaatgttttcaattaaagcctaaagaaaggcatcaggaaagggcattttcccgacaatgtgaagatgccactgggtcagcatacctggttattgtgctgacggagaaatgagatggaggctgcgtctcatgcatgagaagtttcaggtaaacactgctttgatctcttgccacggccactactggatcagcttgtccttggtcacatttataaaacagctttgggacaagcctaacacaaaagtaaggttaatttgcttaagaaagtagatgaaactcacctgtgatagaccaccctcctccctgcagatggctaagccaacacctctggttaccagcggacaccacttctcgccccctttctcaggtggcgttcttcaagcacgtgacagcgttgtctccaatctcagggtcactctcatgcacccactcggacataactgggtgctgtactttctttttttcttttttttttttttttgagacagaatgtcactctgtggcccaggccggagtacaatggtgcaatcttggctcactgcaacctctgccgtccaggttcaagtgattctcctgcctcagcctcctgagtagctgggattacaggcgcctgccaccgcgcccggctaatttttgtagttttagtagagacagggtttcatcaccttggccaggctgttcttgaactcttgaactcctgacctcgtgatccacccacctcagccccccatagtgctggattacaggcgtgagcccccacgcccagctgggtgctgtactttcttttgtctgtcataaaatttaatccctttctatttacactattaaatgctttaattaaaaaccaactttgaaagttctctttctaaaccttctgatcaacaagtgctgaacagtgtctgtccacagagtactgagcacagagcaggtctgaatgccagctgcattccttaggcacttttgcaattttgtctgcaaaactgtcccaaacactcccagatggcaaagcttaagctgcgattcctaacaaatctaaactgaattcaaatggagaatacgggtaacattttcctacaaaaacaaaagggttcatatctgccatcaacactcagtaatacttttagaaacaatgaactattttatcatattggtctgcaagccccatgatcttcaattaaagtctctttcctcatggagacttgatcatgagtagaattttttctagaatataagaagtaactactggctgggtacggtggctcacgcctgtaatcccagcactttgggaggccgagacagggggaccgcttgaggccaggagttcaagatcagcccggccaacatggcaaaaccccatctctactaaagatacaaaaattagccgggcatggtggcacactcctgtaatcccagctacttgggaggctgaggcaggaaaatcgcttgaacccaggaggcaatagttgcaatgagccaagattccaccactgcattcctgcctgagtgacagagcgagactctgtctccacaaacaaacaaacaaaaagaagttgctatcatttgcagaaaatggtaaagctgcaaaatctctgaataggcaagtcatataaacctattaagtaaatgaaaggagtgtctcacaagtaatcaaagaaatgcaaattacaatgatgaaaatgaaaaagaatatgcaccaaaatgtaactttggttttcttttcagtagtttgattacaaagattatttcgtttttttatattttccttaaattctgttcattaaacatgtattactttcaaaagaaggtaagttattttaaaaagaaatatcagccgggtgtggtagctcacgcctgtaatcccagcactttggaaggccaaggcaggtggatcacttgaggtcaggagcttgagaccagtctggccaacatggtgaaaccccatctctaccaaaaaatacaaaaattagctggcagtggtggccctcgcctgtaattccagcttcctgggaggctgacgtgggaatcacttgaacctgggaggcagagactgcagtgagccgagatcgcaccaccacactccagcctgggcatcatagaatgagaccctatctcaaaaaaaataaataaataaagagaagtatcaacttctgcccaaaaaactgatacatatttaactttttttgaaatatttgtactggtgagaagaatcaggcacaatcacattctggtagtgggagtatactttggcatgtttctgctatatgttctcagaagtgggagctgagctgtgggtacgcaagggcatacagtgtggtataatggacattggagactcacaaggcggaaggctggaaggtgagggacaaaaaactacatattgggtacaaggtacactactcgggtgacaggtgtactaaaatctcagacttcaccatgtaaccaaaattcagccatgtaaccaaaaaccacttgtaccccaaaaaccattgaaatttaaaaaaatgtgtatatgtagaaagaaacgaaggaaggaaggaaggaaggcaggcaggcaggcaggcgggaaggggaagggaaaaggggaagggaaagggaaagggagagggaagtagggaagggagggaggaagggaggaaggaaagaaggaaggaaggaaggaaggaaggaaggaaggaacaatggtatgtttttgaagagcagtttcacagtaagtaccaaaattatttaaaaatccacttctaggtgatctactcaagagaaatgaagacatgtctacacaaaatcttgcaggcaaatgttcacagtaccataattcataaattagccaaaacatgaactctataatatccatctgatggatagataaaatatggtattattcatataatagaatactttcgccaataaaaatgaacaaactactgatacatgctacaacaagaaccaatctcacaattaagtaaaagaagccaaatgcaaaagtccatctatactatgaccccagtactataaaatgtccagaaaatacaaatctttgtttgttttgagacagtctctctctgttgcccaggttggaaggcagtggcgcgatctctgctcactgcaacctccgcctcccaggttcaagtgattctcctgcctcagcctcccgagtagctgggattacaggcgtgtgccaccacatccgactaatttttgtatttttagtagagacaaggtttcaccatgttggccaggctggtctcgaactcctgacctcaagtgatccaccaacctcggcctcccaaagtgctgggattacaggcatgagcgcctggcgaaaacacaaatcttaagggacagaaaatagatgagtggctgcctaggagttggggcaggaaccggaggttacagcaaatgggcacaaggatacatttggggtgacagaaatgtgataaaattggagtttactatacactcaaagtgagtacatttcaagaaatgtaaattataacctccataaagctattagaagatttgttttaaatttaaagcctggccaggcgccatggctcacgcctgtaatcccagcactttgggaggccaatgcaggtggatcacggggtcagaagttcgagaccagcctggccaatatcgtgaaaccctgtctctactaaaaatacaaaaattaattgggcgtggtggtgtgcccctgtaatcccagctactcgggaggctgaggcaggagaatcgcttgaaccagggagacagaggttgcagtgagccgagatagcacctggacaatagagcaggactctgtctcaaaaaaaaaataaaaaaaaaaattcaaagccgggcctggtaactcaacttccaggaattctcagaaaaagaaaactatacacaaacatttatgtataataagtaattgccaaaaaaagtatataaaattttatcccaaccgcatagcaaaacaacgacccataactaaaattactgtttcataacaggaaaatgctaataaaatattaagtggaaattgtcagattacaaaattgcatgtaattttgacctgattttgaacaagaaactcatagagtatatagcaaaatattaacagtgattacctccaggtggcagcagaattgaaggtgattttttttttcttcttagtactattctctatagtccaaaatttttacaatgaaagtgcattactttttacaatggacagttagtattttgttgtttttttaattataattttagacttttttggatttttttttcattatagtttaagaatagaatggctgaaatgagctcagattcaggaatactgctctacatcctttgaattcttccctctctttccattctcgtatcttttagtacttcaaccaaaaaaggaaaagagataaaatattggtaaatacctaattagtgatgctgcggcaacatgtcgcaccctggggtcttcatctccaagcaaatggatgacaacattattgagcactcgttcttgcagttttaaaagctttagagagaaggataataaaaataaacataatcttgtatttgactaaattttaggtaagatattttggaaagctagtgagaaagaactcaacattactagacttaaatccatatgacaagattataactttcatgatataaactgtgaaataaacatctaaaacatgacgaatgcatttagagaaattccacaaggaaagcctcactttcaccttcttgaaggtaaaacagcatctcacaaaaataaaccgcttacccctgtataatgatgagcccctctgtgtaagttttctgcttttgcctccaaaaagctcaccagcctaacaaaagagcacatttaacaatgaaatcatttagttactcagtaaacacttaccgccagcttgctccagagcaggctcatccaggtgccctggaaggaccttgggcagcacttactcaaaacaacaaaaaaggccaatggctttaaataaatagaggtggcattcctctcacaattccagactcaataagacagtactcagtaaactgtttttctttttcttcaaaataaatactatttcaaaagactctgtaagtgccctataaaattggctcaagccacagaaggggtgagctgggccctccataacctgctatcttgctgcccactcatgcacgctcagcgtccctatctgtgggtggagccgagaacaagcccagatttataaacattctaaggattaaatgaaataacccacaagggctctataaaaggtggcttggaaaaaaaaaaaacaaaccctaaattataaaggaaaatttcccttctaaaagaaagtactgaaagaaaacttctccagccaaaactactcttagaaaatgaaagtgccaacacagctcatgttatttttttttttttgaggccaagtctcactctgttgccaggctgaagtgcaatggccacaatcttggctcactgcaaccacagctcacgttttttaattgcaacaaaatataaaccagctgtcttacctaggttcagtataatgaagagtatattctttttaaacaagcagaattaatataagctacatttttttaaaagtttaagacaaagatgaaaaattctaagctcttttattcccactatccagaatacttaaatgacgaggactaccaaaaaaaaaaatctactcttctacttatattttaaaattctaggccaggcacagtggctcatgcctgtaatcccagcactttgggaggccaagatggaggatcaatcaagcccaggagtttgagaccagcctgggcaacatagcaagaccccatttctacaaaaaatattagccagtgtgacggcacacacctattctcctagctaatcgggaggctgaggcaggaggaccacttgagtcctagagttcaaagcttcagtgagctatgattgtgctactgcattcaagcctgggcgacagagcaagatcttgtctctaaataaataataaaataaaataaaattccaagcatagggcaaagttcagcaaaaagccactgggaggagaaaatcactgtcatctacctaaaccactcggatttctgatggacagggtacttgataacatcattccttgcatcaagtgatcccagaactttcaattgagcttagttcatgaaatctaatggatgtgactcacttacctgaagtcaatctctgcaagggtttccagaagctctgtcctcaccagccaataggaactgttcctcagagtcagcacatcgatgatcagctgcagtcctaactcactgtagctgctgctgcagagactcatgacacagttctggaacacaaggtccaaggcaagaggacagcaggttagtcccactcagtacccgcgtcttgacggtttgagaaccgtcactcttcaacacacaatgttctgggtttaactgcaaccaggatgttgcatttttcccacacctctcaagaacattgattaagaatactttatctcagtaaatacaagcttaaaagtaaatgtgtccctttcacataactggttctttcttccttccatttctgcttatgtcatggtttcaactctcaaacagcaacttcacaaacattgatcagttacagaggggcctgccgcacagccccaacaccacttctaaataaatctcagacccaggggtaggaacaagggacctacaccaaggaccaccccactatgtcactatgtactccacagcacgagagaacagaacaggcccctactgctgtacccctcccctgcagccccaagcacccaggggcaccatcacatgcatggctgacacaaagacccccagctagccacaagattgagctcttagcatgcttccttctgctcaaaaaagacacaactgactgaaaacctggaaactagagagaaattactgtcaggcatgacattttaaaagggggagttatcccacaaatttgacaattgtaggttttttgctttgatttttaccagttaatttttactcttgttgactggccagttgtgacttatgagccagttggtatggaaaggttcaacatgctatcacttaaagaattgagcctattccactttatacagaaacagaggttgagtaaataatccctaaggctcactttaactcttaccatactatgggcctagcacagtggtttttttttttttttttttaattcaactgattattattactattatttttgagacagtctcactctgttgcccaggctagagggcagtggtgtaaccacgccttactgcagccttgatctctggggctcaagcaatcccccctccacctcagcttcccgagtagctgagactacaggtatgcaccaccatacccagctactttttttttttttttttttaattttctgtagggacagggtcaactatgttgcccatagtcttgaactcctgggctcaagcaatccttccaccttggcctcccaaagtggtcagattacaggtgtgagtcaccgtgcccagcatattcaacagactttacacttaatgataggttatttctaaatatatcctttaggaagaggtctatttcaaacaaatattctgagaattagaacttaaactgaagtttatgaagcattaactttactggcaacgttttctttctaaagctgagagatggatacatggtgggtattactggttacagctttagagtgcatggaaatatttcctattaagctccaattttaattgtagcaatgataaaatgtccactaagtgaagaaatggttccacagaagattatgctcaccctcacagctgtacaagctaacttgcaagtaacagaagactcatccttcagtgttttccgcagcaaaggaatgcaatccgccaaagaaaatgtatttcctaaccagaagaacaagcaacaaacatcatcatctaaacttaaaccttagtaagcataactagaaaaaacacagctgaaaaactggccgttacctgtgagggttctaatggtgcccatccaatctcccacgtggaagcgggacctgctgaggatggagcagatgagggtcccacagagaatggcagtggctcctcgaacctgtgggtctccatgatcgatgtagttcaagatgtctgagacatactgttcctctgtggagataaattgctcagccatggaacaattccctactatcaactttctaactcgaaacaaaagcttaattctcaggaaagagaaaaagaggtgtgaagagaagatccaaattcagaaatgacttcactataataaccctaagtgattaaaaaaaaaaaagtttcaggatttaagaattagagattcatcatattgccaatatgtcctcaataccacagactttctggattataattctaggttgtcagataataaatctgattaaaattccagattccacttaaaaaagattagaaaaaaccctattacacacttacctcatataaattcaaaaacacaagtgtaccctctcacccaaagaaaaagagagaacgagaaggctccatagtaagcatgggcgcgatggagacttgggtccactgctgcctcagccagtcctggttcccactcaccctgagtgtgaatgcctggcctggctgagtgcgactcagcgccactgcgaccaggcacaatttgtgctttaggtttaaatccgatgtgtatatatgttggctcttacgtgctgaggtttctacttttctcctctatgggtttcatctaaagggaacccatgaaacaaagaacttcactattcatgtgttttctgaagagctacaacgcaggtcaaatatcccaaatgaactcaaaacacttactgctctaaaactaaaatagtcaatactgaaatagtttttacaataatgattaaatctgagaaaataagatgtgaacttttaacataccagggtattccgtggtgtcaagaggaactttatagagtttgctgaagaaagattccgggtggagggccacagctgctcccacacagctgagggccagggccttcacgctgaccctcacatccctgtccggaaccagcactgccaagaaatcacccaagccaccttcagcctcaaacaacagattgttttcaaatgaacaaaaccagacccaataacctacctgctcccatcatttcctccctcccctcggctagtgaaaaccaaactcatcctcagattctacttcctctgctgcacgcaaggcaaaaacaggccaccaagctgacctctgaaacctagttatttccttcaactgtgcacatccccttttgtactcaccattttttccccctgttagcaaaaacgaagcagataaaaggcggacacaatggacaagaggtgcagagtcatcatcagtggactgtccaatgtcacctttgatgcggcaaggctagaaaggagacaatgacacttgtttgtctcatactcaacaatacattcatgcattagttcattcaacagatagttccagagcagcacttaagccaggtgctggggataaagagatgccctggtttgtgcccatatgcacacctgacctcacagagaccatggccaagcagaaacagacaagtcagaggcagcaggacacagggtcacagggctgtggcaggggataaatgcagcatgcagggagggtgggcgtggtaagaaggcagttgacactaggcattcaggaacggctgctgcagaagcaaagcatgaaaggtcttctacaggacaagcagaagctacttggggaaaggcaacagcctggggaagcccaaatctaagaggaagtgggcctggtagatagggagatgccaaaggctataattctgattgatgggacgaactgtgaaacgctattccttgtccttgaggaattaaaagtgaagacagttacatttacatgtaaaaagataatatgaagagagacttttagaacagttcagtagaaccaaaacaagaaacgttgcaggccatacgcaaccatcaaatgaatgatccaagaaatcagacaaggaaacattcagtacagaatagatttgtctggggcacactctcaaaggaggcagaactcaggcaattctcaaggctgtgggtagtacctggaaaggcagaaaacaacaggcctgggaagagctggtatttaaaggggaaatttaaaggcccagggatgggaaagcaataaagtagacagtagccagggcgattttaaatcctcacacaagctcagaaacaccaagtcgtctcaagcctatgtccctcaccttgttttcttgatcacccggttcagtagcttcatctctcaacacaaatttatcaacactgctgtcagaaggctgcctgcagtgactcatgtttttcaataaatgtgcctgttgaagggctttaaaaacagagaaatcaagattaagtgacaaatttccacttaaaatacaattatacatttatgctaagataactcaaaagtataagatttagatcaagaaaaagtatgattattcctcaattggtcattttcatcagctattcagaactcagaaaacagtatcaaaggacttcttcttggaagcaaagatataattaagatgtccaggtctgaatacaaaccactttgtagcgcatcacctgtagtccacatacccatggaagagttcctgaaggcctccgaggcttcatcaggaagaatacctgtggcttcctcatcttcatcctggggctgtccaatctgcaggcccaaatactggttgtcggtaccgtctaacacctaaacggttcaaggggggctgtgagaattttgaagtgtgatcaccaagagacaagccctccaacatggaagtgcaatgaggaaagagcacattttacacacagaacacaaatgtactcatctgtcatttatttcaaggcacagaaatgcacgcatggaaactgctaagagcttactgatcactcattcccactacattatgaaaagctctattagctctaaaaactccaaaaaaattccaatgtggacatttctttttaatatgaaaaagaaaaaacccatacaaaaatatttgtcttcacaaacaaattttacagcaagttggaaatatgaggacaaagcttttcgacaaaaacctaacaatataacaggttatctcctaaattgcaaagactaaatctactaaatttagggtatggtatttcatatgtttagccatcagcttggggcatgattccacatcacaagatgtttcatgtccacttgaaatgtcctgtgtaatttacctaaaaaaactgaacaatggactaccagcaaattattaccaaaatactattttattaagtttgttaactactatactattaagtaaaacactcaatgatatgaatgttttaaattaaaattggaatgtaaaagcaactccatttctgggtatttagccaaaaaaatggaaagcagagtctccaggagctatctgtacacccacgttcataacagcatgattcacaatggctaaaacatgaagcaatacaagtgtccatggacagaggaatggaaaagcaaaatgtggcctatccatacaatggaatagtatttggcctgaaacattaggaagttctaacataggctacaacatgcatgagctttggggacattatgctaagtaaaacaaatactgtgtgactcctaaagtatatgagaacccaaagtagtcaaattcagaagacagaaagaagaatcgtggttgccagggacttggcgggaaaggaggaatagagttcaatgggaacagagcttcagtgttacatgatcaaaaggttacagagatgggtggtagcaatgattccatgacattatttaaatgtatttaataccagcgaactgtatacgcaaaaaatggttaagaacataaattttatgttacacatatttaaccacagtttttaaaactgaaaataaaatggagtataaaactcaacatggacttgtagcaaacattattagactatccatgagggttttttgtccactaacttagagatgagaagtgcttaaacctatgccgctatcaaatgggaaatgttgtaaaagttttttgaaaagtcaaaagttcttaaaataatgcacagtattaatcacatttcattaagaccacagatctgtttataataggctccttaaggatttttaaaaataattatttaaccagggcccaacaaggccttaaaaaatgtaaaatgcactcaattttagcagagttcatataatcaactattccaattttttacctcagtgttcaacacaaaagacactaagttgtttccttcagtgaaggtatcagatgaggtcaagctctccattaatgatctaagctgcgctgtcaataggggtattagataacaagagaacaagcaggagggttcaggtctaggtctccagggaagaactcaaaagatggcaggtggcagggccgggcatggtggctcacaactataatcccaatactttaggaggccaaggtgggtggatcatctaaggtcaggagtttgagaccagcctggccaacatggtgaaaccctgtctctactgaaaatacaaacattagctgagtgtggtggtgcccacctgtaatcccacctactcaggaggctgaggcgggagaatcgctcgagcctgggaggcagaagttgcagtgggctgagaacgagccactgcactttatttttttattttttttgaaatggagtcttgctctgttgcccgggctggagtgcagtgtcacgatctcggctcattgcaacctctgcctcccaggctcaagcaattctcctgcctcagcctccctaacagctgggactacagacatgtgccaccacgcccaactaatttttgtatttttagtagagacagggtttcaccatgttggccaggctggtctcgaactcctgacctcaagtgatccgcctgcctcagtctcccaaagtgctgggattacaggcatgagcccctgtgcccggcctccactgcactatggagtgagactctgtctcaaataaaaaataaaaaaaaagatgtcaggcccctctgcccacttacaatttcagaactgtctgaaggggtaacagctgaatcaggcccttcggtggtggtctgggagctgtcgctgatgggcgacgaggcctgggtcccatcattcaggtccatggcagggtcagatgggacggcgctgacctggctggagctgtggctcaagatatcctcctcatccccatcagtggcagagcttgtcaagtcacagctggccagatccactgagtccgcctgcagtgtgtgctgtgaccgtggctgttctgtgatgatgtcatgacctgctgaccctggagtggaaacccctgaagaagcagccagctctccactgatctcatccttcactgaggctgaagacagagaaacactcatttgtcaaatggcgagagaaaacattcaatagggaatcacaggcttgcaaaataacgaacagttccaccgttatcaaatgtttcagctgcacagcatcctgaagatgctgaaatgcaggacagcagtgcatccttcaagcatctctcacactgcctcccactacagtacccaccttataaaataaggcttatcagaaggtgatattctcaaatgctgtttcactgcaaaaaccgaagttcaagttcttaaccgactactccaagccttagctggagcaatatataaagacatttgtaattaaggggcagcctagtcaggggcgcaaagctaggcggtcacagacacgcaggccctctaagcaagcagtggtcagaaacaactgtcaactcatctctctggggtgggcttgccttcttccaagccacattcaagatctcgactccagtcctattctcctggaagataaacctgtaacacattttcctagttgactttctaaattaccatttaaaaacaaaaaaggctatataaaaattatggcaaaaaggtcgacatgaagctgttggcagtggtcactcctggggcagttgggtcggtaagcatgtgagctttatagtatccggattgctgtgatgttttattgttgtttaatttgtgtaatcaaaaaaaaatctatttttattttgtaaataaataattactactagaattattcagattttcctctctaaatatttaagtcttactttcagttatagctaaaatattcttttagataggattatacaaccaaaaccaccctcatataatccagttattagtaccttcagttaatcctcatcttttataaagtacacagagaatttcattagataagtatctgtaactggccgggcacagtggctcactcctgtaatcccggcactgtgggaggctgaggcaggcagatcacttgaggtcaggagttcaagaccagcctgaccaacatggcaaaaacccgtctccacaaaaaaatacaaaaattagccaagcgtggtggcgggcacctgtagtcccagctacttgggaggctgaggcaggagaatcgctggaacccagaaggcggaggctgcagtgcaccaagagcacaccactgcactccagtgacactgggtatctgcactgggtgacagtgtgagactctatctcaaaaaagaaaaaagataactatctgtaaacaaaggcagattctttcaagttaaactatccataggcaatttttcatcccataatttttcatcccatttcccaacccccagcataacccatccaactcatgagatgtttcgacctgccatcccctactcacaaagccctatgctcaagccataaacctaattttaaaacagcctaaaccatggaaaacaacaaatatatgatgcaaacaccacagacacacaagcttcagagtaagtattataaaagaagcccgaatatgccccatttaagcaacctggctccactgctgcccccagtcgtgctgtccaccaggtgcagggggacgagcaggaagggcaaggggtggaaggcagacagtgaaggtccacaccagcggctaactagtgagaactacctgttaaggcagagctgctgacatccgatctcgattcagagtcatcctccaaggcttcttcttctcctaagagcactttgcctagtaaataatgtaccaacattccttttagtttgctaaaaataaggacttcaaaattaagtaaatgcactctaaaatgaaactcataagaatatttaatttactctaatatagtttatcatcatatataagtatttttatacctccacagtattaaacacaaagaatgtagagatgttatgtttagaatgctattaaagtcaataaacctatatggaaaaagttaaaagcaatgattctcaaactataccacaaaacattttaataattaatatttattgattttgattattaaataatctatattactacttaaacttaaaaatggtaagttataactgtaaagatccaatgctattggcctttgaaatattcatgtcatagctccaatgacacaccagaatttataataaaactctaatacctaaaagtcactttcattttattatcttttaattttctagactttatgattaacaatcagaacttaagcattatatgatctggaaggatgaaataatatttcatttgaaagttctaaaaatacattttattgttcatcttcagaattacattaatgagaacaaatgaaaccaacagtcttaatatgatttaaaactgaactcattaaatctttgtggctacatcacatgtgagtgtcattaaatgacactatcaaaataattattgggaatttctaatttctgctcttcaaagaaaaagtcagaagtatgataacttccataaacttacaatgatgtgagattaagagtgaaaaaatgagcaaaggaaacccaaaatctacatggaattaacacagcaacttggcctatctactaaataataggaaactttattacaaaataagttctttaccttgagaaatcaaataaaatgccaaaaaggtgaattcagatcttaacaaaagccatctctatcttccaaatcagtggtttgcaaatatgttccacagagccgtccccagggtaatttcctcaaaggcacaagagctaggctgccaccagaagagaggctccaggacacccccactactttcaccctaatcctatatccaacacaactctaccttcatctgtcttataatttgggcagatttcacttaaaaaggattttccagctataacagaagagtttgaagacacagctctcaatgggggaaaaataccaaaaaggcttaaaagagacaggatatatcccatgtcccagccagaagaggataaactcatctgagcaatgtgaatcagtcatcttcgttctcaccgccactggaaaaagcgactaagaaacaaacaagtgtcagcgtaacttagtcacacgtcccaaaatctctcctaattcaagaatatagacattaatttttcctagaatccttttggcttctaaacaatgtttcactaaaatctcaaacttgattaagtatctcatactatgatgacgcaaatattatagattccaagttctcttaagaaatgtttacttaattcaatgaaggctagaatgctattcctgttaagatcccatttaatactgcaaataatattaggcattaggctctcaattaaatactcaaatcatgacacaaaaaaggatcagtcttttaagatttcaaaatagaaagtgacagcaattcttttcctatgcaaacccacactggaaaagaaaataactggcattgcaaaagataatgtgtaccaaaactagcagattatatcacaaacactttaataaaagttaagttttatcagaacattctgatatgtacaaagttaaatatggctgaaaaatgataaccaggtccaaattaaaataacccaacaaaggaaactttttttttttaagacacaaggtctcattctgttgcctaggctggagtgcagtggcatgactacagctcactgtgacctcaaactcctgggctcaaacaatcctcttgcctcagccccctgagcagcagctgaggctacaggcacatgccacatgcgtggctgtttttttgttttgttttgttttggtagagaccgggtctcactatgttgaccaggctggaaaagaagctacttaataatattcctgactaatactaaataaaatttactgagaaggtaactcacaaaatataacaacacattccctaaggcaggtattggcaaactacagcctgtctgtttctgtaagtaaagttctactggaacatagctggccagtagctcatgtctttacaactgcattcctgtcacagggcagagctgaatgttgcaaaagagaccatatggcccataaagctaagatgtttacactctgtccctttacaaaaaaagtctgctgaccccgaacattagaaatttatgatgcgttcaaaatttatgacaaagcaattctgatatgaaagtaatttttaaaagccaccctacaaaactattcaggcctggttatcagattccagcaacattcacacatataatcactcatctgagaagagatatacacagagtccaatacagtattacaagaaatacaagatacattacattacagaaatacaagaaaatcagtaagattcaacacaagactctgatttctgaaataatcacctttttgttttcttgaaaggacagggctgcatgaggaaccccctccagctgcaaatcacagaaagtgacagataaagtaacaagctgataaaatctagaagaaatgtgaaaatcttcaaacagcttgattcaactttaaaactagagaaaatgtgaacgtttttccacaggaaacacttaacatcgcagttcaacattttaatttcaatatgaaaattacattaacattcaaatatatagttctaaagatatgacctaagaaatcaaaaaagctaagataaattgcattgtaaaagccaaattaaaagtattagaaatctcagattatttagctgactaacagtcaagtataacttttcattagcgatgggtatttccactcattatttgtaaggcacgcattccatacagaaaaaaattcttccgtgtaaaggacaggaaacaaggcagattaacatttcctgctcatggttctggcaaacatttatgttcacacgaggcagcagtaagacttcagtcagattctctctaatgtggaggctgtgagtaaggccacgctgcacacacactgtgcactacaccgaccacgttgcagtggcttaggagaggccggagtcagcagaagtttatccatagcctgctaggcaccagacccagtggtagaggctgggatccagctcccaaaggcagctctcatgccagacaggacccaccaagctcactgctccagggcagcactgcatggtggggtagggcccagccccaagagcatggagaggaggtgactgggcagtggaggcagacgcagagctggggacagacggattttctcaagtcaggccaggaaggaactctcagatccctctgacgacttgaagatgccatttctggcaaattaacatgaggatcctggaactattttccctactgttttcatttctcagcacctaaaatgccacaggaggcagccaaggcagagaaaagaatcaggaggaggggctttaaatgtgtggcctcattttgccacccaacctgctaaactttaattctcttattttatttttaaatttattttgagacagcatcttgctctgtcaccaggctcagtgcagctgccatcaagattcactgcagcctcaacctcttgggcttaagcaatcctaccacctcagcctccaaagcagctgggactacaggcatgtgccaccatgcccagctaattttttttttttttttttttttgtagagacagggtctcacttggccaggttgtctcaaactcctgggctgaagcgatccttccaaagtgctgaaattacaggcgtgagccaccacacccagcccaactcccctatttataaaataaagatgaaatttgtattataagttttggcaaggaagatggaatgcagactgcttagcacagggcaggcccataatcaatagagtgtaactagtattactgcaaagttaattgtaagagtagaccttgctaataacttgcctataagttccacaatactcccactacggcttcggccaccagactcctccttagcagcggtgagctgcccaatgcccccgactgcggtcagggtttgcagaagctcgggtggaggcgttctgaagagctgctgcaacagctccagggctccggtcacaacattgtggtcttggtgctgtgtatgatgtaacgtcagttcataaacctagaaacagagaaacacaggtgttctggtcagagtttataaaatgcatcctaagcttcacttttttgttgtttttaataggacttcattgacaaagtttataccttaacttctccccctaaatatttccctatcacttccaccaatgtgatcattagcttccatgttgttttctaaattcccatgattttttgttatattaattccttaaaaataaatggagcacttgcactagaggagcagcatgagaatgaagatctctatttcccaaaactggtgactaggaaagggaaaataaagcccagcatacacggaggggagagtcagcttgacacacatttaaaaatcaaaaaacactattatgagtgccactgagaaagagctaccagacattttaaaggcagtatgccatatttattagcacttttaatactatatcacagtgctacccaacctttctggcaccagagactggtttcatgggagacaatttttccacagggccaggggatggtttcaagacgagactgttccacctcagatcatcaggcattagattctcataaggagcgcacaacctagacccctcacatgtgcagttcacaatagggtttgcactcctatgggaatctaatgctgccactgatctgacaggaggcggtgctcaggtgggaatgccagctcacctgctgctcacttcctgctgggcagcctggttcctaacaggccatggaccaataccgctctgcagcctgggggttggggacccatggaccagtaccactctgcagcctgggggttggggacccctgctatatcacattatatgaacataatgaatttattctttttccctttaattacagttgccagataaaatacaaggcactcaaatttaaactgtaaacaaacaacaaataattttgtagtgtaagtatgtcccacatgatttggaatatacttacaccataaaattactcataatgtatctgaagttcaaatttcactggtattctgtatttttatttgctatttgccaaccctatctttaatattataaaatacatgtttctttttttcaaaatcagacagtgtagaagagtataaagtaaaaagtctcacttttagctcttctgatggtaacttctatacccctgaatcccaggtcagcaaaccacagtgcacaggtcaggtctggcctgcacctgcttttgtacctaaagtttcaccggaacagagccacatttatgggctgcctgtggctgctttcatgctacaaaggtagtgttgagtagctgccacagacttgggatggcctgcaagactgaaaatatttactatctggccccttacacaaaacatttttgggtacctgctctacgtaatcagcttatactttgacttcttaagccatccattttgaacaaagaatctcctggctcctctcaatgtaataaggaaatcagcacccacatttccttcacctcatctgccccctcctaaattctgttagcaacagcactgctttcatactatggagatttccatttacatgctcctaggtaacactatttacatttaatgttctctgcctagaagttgagccaaaaaacttaactaaaaataaacagtatgtatcttacacatcacgtgttcataaatgttattcactgcataatttatgaacaataatgttcacaaatgttattcactgcaataatgaaatatttctttctgagtccagtcacaataacctagactcagaaagaaagaaagatttcagtactactccatgtcatttgaaagagaatgtcccaaggttaatggtcaaatgggttctcttactctaatctattacttgcttaaaatttattctgcaccttattttgcttcatacttggatcacaaatttcctttataaatcttgctgaccctcctatggatggttactaattgcctttttctccctccttgttgataatatatgcatatgccttccctctgcccagcttcttaaacatactatttattcaagaagaatggtttctaatacgaactacgcgccaaacagcaatcatcctagaattgcttttactgcatgcctaggtgagagagtttgcttcttggatttcagggcttcctctatttttcaatttattcctttttcgaaaagcacacatggaaagcaaactaagttcctgcatatctaaaattatcaatattttgcccacacttgcttaatagtttggccaggcctaggattatattaaattctaattaaatatggttagccaaactacatttgctgaattgaacgtctcatggtaatttaattaagaacagtttttagtcaaaagaagatggagtaagatatgttatagagataatcatatctagagtttagaatttgccagttcaaaaatgtgccacatcatttatttactttggagaaaggtcttaagaaaatcagcaattaagtctcacatccatacccttttttccccttcaccctctatccctgtccttccaggattactgcaatcccaatttaacacagtttcgatctgttcacaaatgttagaaacctccgtaaccagcactcttgctaatctatgagaaagcctgcaggccttttcaggacccacccttgctctgtctacgcacccacactcgtgtgctgtgagcactgtctcaccctttcactcctgggacttagcaaagaccacattttctgtctataaagctcctgtcttctcccaactctgtgccgggtcagattccacgtgcccataagtgacggctcatgactgaacttctccaggccccaccatgtgcacctcaaccttgctaaacggtttagtaattatttgcttttcccatcagaccaatgatctctaaacttttatgatcaagcagccttcttaaaagcatcagttaaaaaaaattgagcatatagtttcaatactttttaaaagagtacacttatcttaaaatattatataagaaatactggactcagatataaaatatacactaaatctgacaaggcttttcctccaattattgatttacaggaaatacagagaagagaaaaaggtgttaatttacacagtggagatggaagcagtatatcagaccacaggaaaacttagaagacaaacaatctggtttctcaataaatgaactctaagggaaaaaaactgggatggaggggaaccagttcatcaaagagatttacaatccttatcgaccaattttatttagatgctgattccaaaagagtagagagaaaaattgataatgagttggtgggtatttgatgtaggaaatgtttaatattttcaggtctaacaatggcactgttttgtgacgttgttttgcagttttgtttttttgagacagaatcttgctccatcacccaggatggagtgcagtggtacaatcatggatcactgcagccttgatcttccaggctcatgtgaccctcccatctcagcctcccaagtagctgggactacaggcatgcatcaccacacttggctgatttttttctttaagacatggggtttcgccatgtttcccgggctggtctcaaactcccaggttcaagtgatccgcccagcttggcctcccaaagttctgggattacaggcatgaacactgcatctgaccatcattttaaaaataaagttttaaaaataaagaagagtcctcatctatagagatactgaaatacttatagatgaaataagaggataattggggtttgctttcaaataataaaaaaagggagaagtaggattataaatgaaatataactggtcatgagttgatacttttgtatgtgtggaattctcaataaaaagctagcttaaaaaaaaaacaaggcaaggtaaagatgaaataaactatattttaaatgtattattaccatggctacaccctttttactcaacaaaacactcagcagtgttttttgtgaaggaaatataaatgtcatatcccatgagactctgcttttattctgaaaaataaccaaagggcagctggttggaacagaactctcagccccaatactttcttaagagtccacttttgctcagctgtttatcaacacgcagcacttacatggccttaacatgtgccaggaagcattctaagcattttacaaacactacctaactcagtgcttaaattattagcattatcttcaattcatgattctattaagaatcattttaagccacttacaatttcgtatcctacaaaacttagctaaatggcacacattaagcacaataaaaaccctgacataacattttaagtaaagttcaaaaaatccaattgcttaaaatgaggctgcatggttacatagttagtgaaataacctgagtaagcgtgctacaaagaactgaagtcaactgccaatcacagtacattagaattactgcaaggtttctctgcattggaaagagaagttccgacattttgttccgacaccccaaacgaccacgtccctatctccttgagtgagcatataccaccgtgcctagaccagtgtgctaggccacagcctccacggggcagaagctgcagctgaaatactcaccattgtatacccagcccctatcccagagcctagcacacagtgggtgctcaatcagtatttactgggtggatgaacacatatcgtgacctctggttttagaaacagggtagcagtggtctctgagaggcttaggtaacacggcacctgaggaggcatcacccgcatttgactcacggtgacagggacatacagagggaagacagctagaggtcagcacctagggttggaaacgagcagcgcagctccagagtccacacctctaactctcggttctgccgcttctcttccaaattaatcggttctttgaatgtcagtcattcacatgcagggcctagagtaaaccctgtgctcctacctggacaagctgctctgcagaaggagagacttccatttctttccttgtcactccgaagctgcctttcaggcttgtgtccttgacctgctgctgcagcaagggcaccaaatacctcagggtgagcagcacgccaagaatcagcagagtggagtgttcatcctcgacaggaacgagtaagcctgtgggggtggaagcaagacatcttaacatctgactcactgtttggagattcccggcttaatctgttaaaaaagaagagatcctgagagatcaagatggcacaaacatgatcatgaacgagtacgccatgaggcccactgggaatggctacacacccacatccctagctcagcaaggtcctttccagagagcctcactgcctttgaaagccaggtcgttatttcatatcgcacgtccacatgctcgcttcagcacttgccagtgttcgtttccacagttacccaaacaacaggagaaactgtcaactgacctacagagaacccgcaggaacccgaggcacagtctcaagcctacaagactcaccatagtcatggccgacacagacagagggccaggccctgggtggcagacagggctcacaccagcccacacccactgcccagtccctgggcacggctgcatctgcagggtcacagagacccatgcgggctcacagcagccccagtgcagttcacattcaatcaaccagtgccaaatagcctggtctagaagctgagggatcatctggttttatttatttcaaaggtctatcttgagtacatgctggagactcttccactcatatgcctccaccttacctaagagcacatttagtagccaactatagaaatattgtgtccttcttgagtgctggcagatgctcactgctgatccagccgctgtccgccgaatggtgggggagcttgacttcaggttcgctatgaaggcctttaacaaaacctacggaagcaaaagtccaagtagataaaagatgaagctcctatgaagcttatcatgtattacataaaacttaacgtgaattagaagtttccaattcttgcaaagtataaacagtttgaggcttttcctacagctgaactgaagtaccccaaatttgggacactcaagagcagtttacagacatgtgtagtctatttgcttctttataaccttcactcaggggactgctcagcatccatgtcctctccgcaatggtggaggcctcaattctagatacactctgcccacagtatttggggacagttaaaaaaaaatcaacaaatgacaaagttaaggagaaaagagtactagccaactgcagtaaatgccccaccctaagagatggcttgtagaagtcctgctaatgtcacgaagttctcaggactggaacatcttcgatcggaaatatctgcaatttaactggacatgaccgcatactacccacaaactgttctcctaagaaattagggaatactttctcatgggcctctaggacaatccaaaggagaaagtgctataactctaatgatggccatttaaatcttgataaaaatatcctaaaattgaaaaggggtgacccagctagtcgcattatcttggtgactatgttacttaagaacatccatttcccattattcaaaactatgctctgagccatgacttgattccaatcattgttcagcatgcactgagcaagcactatgagtcggggactctgtcagagctacgcctgggcaaataagcagtaaactagtaactggcatctgatttataaataagtttctctttcatggcgtggttagcatagtctgtttctcagaggcttatcgcctcccagggaatttacacgagacctctgtattgggagcaggccccccaaaatctggccataaactggccccaaaactggccataaacaaaatctctgaagcactgtaacatgttcataatggccctaatgcccacactggaaggttgtgggttgacaggaatgagggcaaggaacacctggcccacccagggtggaaaaccgcttaaaggcattcttaagccacaaacaatagcatgagcgatctgtgccttaaggacatgctcctgctgcggttaactagcccaacctcttcttttaattcggcccatcccctcgtttcccataagggatacttttagttaatttaacatctatagaaacaatgctaatgactggtttgctattaataaatatgtgggtaaatctctgttcagggctctcagctctaaaggctgtgagacccctgatttcccacttcacacctctatatttctgtgtgtgtgtctttaattcctctagcgctgctgggttagggtctccccgactgagctggtctcggcacctctggacactgttaggcacaggatgagaccccagccacaggactccctcccaacccagccacaggacttctctccttgccagccacaggactccctgacaaggagccacaggactaccccaccccccagccacaggactcccccagtggcttactgcctccaatttctccctgagaaaacacctggagaacaaagtagaatcatctctgacaaacttttttagctgcaagaaaagatactaacatcttaaaaaactactttggccaagctcagtggctcacacctgtaatcccagcactttgggaggctgaagaaggcagatcacttgaggtcaggagtttgagaccaacctggccaacatggtgaaaccccgtctctactaaaaatacaaacattagccaggcatggtggtacgcacctgcagtctcagctacttgagaagctgaggcacaagaatcacttgaacctgggaggtggaggctgcagtgagccgagattgtgccactgcactccagcctaggcaacagagcaagactctgtctcaaagaaaaaaaaaaaatcattgtatgagtccaaatagacaagcacaatgagagctactcattattatgatgagtcagcacacggtgagcttaaatagtttggaataataaagaataaaatttagtcagagagctccaaggggcctcctcaggtctaatctctacaatcccaagaatcccttctccaagccagctaacaggaggccccaaggccacgctacaactgttcaaacacagaggaggcatactgtattttagaatagatagtgccacttttcaacacatgcacaacatacctgtaagagtacttcaaaagggaagagatgcatgaatcattaaacttcagagccaagggtactttaaggaatggaaattaaaatcataatgtgattccagaaaacacccatcaggaaggctaagagtaaaagcatcagcaattccaagtgctagcgaggaccagagctcctggaatccccatacacagtggcaaaagggtgagctggtacaagcactcaaggaaagctatttggcagtttctactgcagctgagatgcacacaccctatcacccaacaactccacctctagctgtgcaagatggaaacctgcacatgtactccaaaagacacacctaagagtggtcacagtagcactgctcgcaatagccaagaactagaaacaacccagtgataatacaatgaataaactgtggtatatccctacaatggaatgctatgaagctcctaaaactacaggaatactaatacacacgataatatagaagactctcatgaacttaatgtcgaccaaaataaaccagacaaaaagaacacttaatccatggtctatgtacacagaatttaaaaacagactctggaattagaagccagcagtcatgaccttggggaggaaggcaggagcagtgacgggggaataggggagaggcttctgagtgcttggtaatattctgtcttgacctgggtggcggttacaagggttaagttcactttgtggttattcaccaagggatacactaatgatttctgtcctgtatggtatgtacatttcctgtcaggaaaaggaaaaacaagggagtatcagtgtttggcaggtaattttgagaataagaataaaccagagggtgggagatttctaatccaacacgctggattgaacttgtgaagctctgctacccagaaaccccacaaaaatcatgtaaagaagttgtataaagcatatatttacacgaacagaaagaacagaacagggacattagcagactacgggtgtcaacaaaacttcggaagctaaaaagtaacaagagctacataactgactgatttgttagcccgtaggaagaagttcaaatgcaagctttgctggggacaggggagggtaggagggataccagcaaaaagcaagcttattgaagccacagacgccaagaagagctcgggctttggaggcgccacatacatctgaaagtggagggatggagagggtgaaatagtggctggtctcatggctccttgggcaaattcccacccactcacctgaggtcttccctccaatccaaggcagcccaggaagcagcccctcccccacctccggcaaagattgagagggataatctcaagaggtgtttacataggctgaggacagacgtgagatgcacacagaaaacaaaaagtaagagggcaccctgaccagcaacactgtcagtcccctcccttccagtccccggttgcaggataaacatagccaagcttatagcctccaagcaggaaaatgagtaatttccttccagggatactagctgactcaagaggaaaagacttatagatactggtatttaaagatctaatgatgggctcacgcctgtaatcccggcactttcggaggccaaggcaggcggatcacctgaggtcaggcgttcgagaccagcctggccaacatggtgaaactctggctctactaaaaatacaaaaattagccgggcatggtggtgcacacctgtaatcccagctacttgagaggctgaggcaggagaactgcttgaacctgggaggcagaggcttaagtgagccaaaatcccaccaccgcactctagcctgggcgacagagtaggactccatctcaaaaaaaaaaaaaaaaaagtaaagaaaatagctggacgtggtggtgcatacctgtagtcccaactacttgggagggtgaggcagaacagctgcttgagcccaggaatttgaggctgcagtgagctatgatcgcaccactgcaccacaacctgggcaacagggcaagaccccatcaagagacaaagaaaagaaagaagttaaaaacataacaatgaatagaagagtttgagatggatatctaaaaagtaccagaaaaagaaaagaaaaaggtaagatgtgagtcaatctaggaggaccaacatccaactaaccaatttcaggagagaacacagaaaataaaaggcaagaacttctcagagaaatgttaagaaaattttcccagaactgaagggatgtaagtttccaaattaaaaggcctactaagtacctagcacttcacctccccaaaaatggaaagcttccaaagaaaagtacattcataggttaaggaatcgggtcacgttggagattttaagacaacagggcaaagactttgcatttctgagggaaaatgatttctaccccagaacaccatacccagccaagtgtacaggaaaaaaaatggcatttttatgaatgcaaaacctcatacaatttccctcccattcatcttctctcaggaagctactagacgatagaaaaacatatggcatctaggaactgggcatccaacgggagaactgcaaaggaaattccaggctaatggcaaagagaagtcctaggatacaagtgtactacagacctgaagatcaacctgcccagactggggcagagagctggataactcaagttggatgaccacactggggaaaaactgattcagtaaactacctgtcatgaaaaattgtactaaacacatattacaaagaagttggaaggtgtgagaagacaaaaaggccaaagaataataagcaagcgatatagaggtaacgattaactccaagaaaacagatgtgaagattaactccaggaaaacaaaaagttgtacaaagacatataatcaaggcacaagccagcaaagagcaaggcagcagcaatggcctctgaaaggaaccagggtctgaggaaagctgaacctagaagtcaggatctggaagaagattgaacacgacatggtgatgaaagccagcaccagcctgcccaagaagctggtgctgctgaaggccccaatcaagaagtgggcggctgtctcctccacctccaagatgccttcctaaggatgctggccccagcacaagccaacactgtagcccccacctccatgattagaccttgcaggtggcccccccgtccccagcactgggtcacctagaacttcgataggggcctggcctatgagtaggtgatcagcagatccccgggtgctgagaacccagctatggccatgaaggtacagtcaccaacttcatctgtcctcctcctcctccccaggtcctctctccagtttcaacccagagcaaaaaacacagctttctcatcaaataagaaacacaatcaaagaaatataatacgtaagcaaccatgactatttacttaggcataataacgtacacactgaattctgatagaactatagtgaaagtaaaaaaatgtctaaaattgaaaaaaaaaatagcagtagaagcatgttatttagaaatgtggaagttgctgggcgcagtggctcacgcctgtaatcccagcactttgggaggctgaggtgggaggatcacctgaggtcaggagttcgagaccagcctgaccaacccggagaaaccccatctctactaaaagtacaaaattagccgagcgtggtgatgcatgcctgtaatcccagctactaggaggctgaggcaggagaatcgcttgaacccgggagacagaggttgtggtgagccaagattgcgtcattgcactccagccttggcaacaagagcaaaactccatctcaaagaaaaaaaaagaaagaaagaaagaaacatgaaagtaaatattggaagaaatactaagagttatgtttgcctgtgagacacaaggattaagagaaaaagtaggaagggaactactatctttgtttataatcctgttggtactactgaatttcattgataatatatatatatatattttttttttttaagaaatggcatcttgttttaccacccatgctggagtgtggtggcacaatcacagctcagtgtagcctcgaactccaactcctgggctcaaccgagcctcctgtctcagcctcctgagtagctaggaccacaggcacatgccatcatgtccagctaattttttttcagtttttttagagatagggtctcactatcttgcccaggctggtctcaaactcctggcctcaagcaatcctcctacctcagcctcccaagtagctacaattataggcacaagccactgtaccaggctcttgataataaatttgaataaccataaatgagcagagaggtagcagaatagattttttttaatgccaaaggttcaggaaggaagtaattaacggattctacgttcaacaaagtgttagcatcatcatactcaaatggtgatcgaaatcatgaaaatgatgagaactaagagtacaaaaataccatctatcatctgagctctgacagccagagatatcacagaggggactgccttcaacagaccccagtgtacagatgggcaaactggcgctgtggagctctcacagcctctgaccacaaaggagcacctactcccattccaaagagatggtaataaaaataacagcagcagaaactaccatttactgagcatgaagaaatattacactaaattctttagattcatcatctcccttcgtcattccaaaaccccatgactagtttgaatatctccttagtattaacaagaaaacttcgaagctcaagagaaaaaacatgagagaggctaacagtttattccaaatcattcagctaataagagcagtagcagctaacatctaagcccttcccgtgggtgactatgctacactctaacacatattcctttattttactctcagagttgccctatatgggtcccattaaggcttatttttcagaatacgaaggaaatagcttagagctgttgggcagtttgcctagaggaaaataactagtaaagaggacagaattctaatccaagtccatctgattccactctacccagtgtgtatcatcacctcccaggagggtcacttgggctcaaacccaggactgacctaccaaaaaggaagaggctaagaatcctgtaatctgtagagcatgtgacagggtcactatttctggacattataaacaaaacactaaagtgggtttgaagatgatttgttggaatgcacaacaggaagccaacaggctctgatagctgcaggacgttcagacccacaaggcctcgtcagtgagctttctcctacctgcagtcttggcacagtcatcttcccgcagctaggttaaagagtcactctagtacgccgaaaacaaatctgctctggaaaaatgccttttcaatttgcatctagaaaccatctcccaattcaactcttcaccccacagtaagaaatgagaagtggaaagaagtccttaggtgcctcaaaaataacacaaatgatggtagtctaaattacgacatacaacataccccaagaagcactcccacaggactccctgttcagaagccctcaccctccacagactcactcacagcatcactcgcatgtttgtgacctgaggcaacaatcataccttaatttcattgtcatttgcaaaattgccaaaagaagccataattttgggaacagctgcagccaaggtctcctggactgattcttcgggtctcttgcttgttcgagtcaggcacggcagaaggttcaccaggtaaggcctgtgtatgcaaaagaacgcaagtcattcttccagctctccttcaggagaaacagaagcaattcattccctgttagggaaaagccagttttatattccaacagtccctaatgggatggggaaaactcagctgaaagaacaggaggatgaaatgtggatgaagctcaagtgttgggagacatccttcatttctcttatgatcacagaggatctaaaaggctgggtttaaaaattatttgcagtaaatcataatacttcttaaaacactcatttttaattagaaaataagtgtaagaaaataccattttaaaaacaaaaatttttaaatgggaataaagctttcctgaaaaaggagaattataaaatggggttgtggggagagaagaaaagccgaatgtgtaggacacagagcagtgagtcacagatcacaggaattcacccaacacacagagtgacagggcaggccgggtgcgaggtgccaggagtggtgcagccctgccctctagtggcagagtctggcaacaagcacggcctcagagggtggctggggaaacctccctaaggaagtgactgttccgctgagaactaagggggaaaaaaaaaccatcaggaggaagaaaaacctgactctaatcagactaatgagtcaatgcagggtgtctgaggtgacagagccattgacgagtctggaatctctatctaaacggcactgggaaatgggtacaagagtttaaataagggaatgacaagacccagttatattctttaaggtcactttggctgctatgtgcagaacctggatgtgttgcttcagaaatataacacatttttttaaatgatagtaaaagaaaaaagattatacaaaaggaaatttccttagtgattatacctctgcagccatataagttcttttctggattttggtttttttgagacaggtctcactctgttgcccaggctggagtgcagtggtgcgatcttggctcaacacgacctccacctcccaggctcaagtgatcctcccacctcagcctctcgagtggctgtgaccacaggcacgcaccaccatgcctggctaagttttgtattttttgtagaggcggcgtttcaccatgttgcctagtctgggtcaagcaatccacctgccttggcctcctgaagtgctgggatcaaaggtatgagccactatgcccgacccatataagattcttattgaaactcagttcatattaatagtgagggtttagaccacattcccagtgactcaggatggagctgagggtctatgggatatcagcatcagcatgtattgctggttaaggagaaggagggagctgatgaaaagtggtcctgcttttgtttctcaatccgttaagatacaactgttttgactaaaccaaactattcacagtgcaacaaccatatttttaactcatgtaacagacaaatggatattttgctataactcctatagtcagcaataatgaaattggtacctcaaccttcaacaatttggcaagtatcttttaagcaagtactatgtgcagacactgttatcgctgctgggctgcaacagagcataagacagtaagacccctgctgtcctggggcacacatcccataagtctcttgcggaagggtgggatagaaaataaacaagcacacagatagactgtacgtgacaatttctgacatggattagtgctatgagggaaacataaacagggcaaggtcgactgcaatttggagagggcagagcagacttttgaaatgacatctgagctgagacataaaggatcagtagcagctggcccccgacaaaaaccaacatccagagtgtacaacttacctgcatttctgaggccgaaccaggtgagccagctcagcaaacctccacagggcagcacgcaaactccgaggggcaccattctgagggggtgcaatgagggttgcattaagagtcacatactagtcaccaagagggttgcatagaaacgaagcattttctttccttgttactttctaattttagagaaaaggccatttaaatgcataaaacatctggtaactactttaaggtctagtgggcttcaattataaagatataaagtaagttaccatttttaattctcatctcatctaataaagagtaaccttttgaagaaaagtaaagcaatcgtctaccaaacagcatttccttctaacattgtgaattactgaataacgatgaaatcccacacctgctgcttaacagagtgaagtttgctcagtgatggaaataagggcccaagacctggtattcgacagcacagcagagggatcatagacaataatatatagtcgataatagtggtttgttttttgtttttttgtttttcttttgagacagggtctcacttggtcgcccaggctgaagggcagtggcacaatctcagctacctatagattcaaccttccaggctcaattaatcctcccacctcaatctcccaagtagctgagactatagttgtgcaccaccacacccagctaatttctgtacagacagcgttttgccatgttgcccatgctggtctcaaactcctggtctcaagcatccacctgcctcaggttcccaaagtgctgggactaaggtgtgagccaccacacccggcccaattttatttcatttttattttttgagacaaagtctcactctgtcgctcaggctggaatgcagtggcgtgatctcggctcactgcaacctccacccccaggttcaagcgattcccctacctcagcctcccgagtagccaggattacaggcgcccgccaccacacttggctaatttttgtatttttagtagagacagggtttctccatgttggccaggctggtctcgaactcctgatctcaggtgatcacctgcctcagcctcccaaaatgctgggattacaggcatgagccactgtgccctgactgttttagttattttaaaatgtacaatcaggcccggcacagtggctcacgcctgtaatcccaacactttgggaggccgaggcgggcggatcacctgaggtcaggagtttgagaccagcccaaagttcggttgaacccgggaggcggaggttgcagtgagccaaggtcatgccactgtactctagcatgggtgaaagcaagactctgtctcaaaaataaaataaaataagtaaagcatgtaactggattgtttgtaacacaaaggataaatgcttgagggcatggatatccaactttccatggtgtgattattatgtattgtatacctgtatcaaaatatctcatgtaccccataaatatatacatttacatgtacctacaaaatacgtgtacctataaaaatttaaaatttaaaacatttttaaaaaagaaaagcaaggcccacctttttaatttccttatagagctcgagctgtaaccttggaagattagaatccatcaaagcctacaacaaatcacaagagatttatggaagacacatcccatcactagttctaaaacgagctaaaaggaaactaagatttcaattttggggcaaagcaaaacataatagcaactaaattaagaatatattcattaagaatgaaagaaacaaatatatgcaggaagttactgaataaactagatacaggtcattcacttaaacagaaaaatggaaagaaaaacaatttaactttcattatcatcaaatactacataacatcaaaattaaaatggtagatggttcaaatacaataaatcctggccaggtggggtggctcatgcctgtaatcccagcactttgggaggccaaggcgggcagatcacctgaggtcaggagttcaagaccagcctgaccaacatggagaaactccgtctctactaaaaaatacaaaaattagccgggtgtggtggtgggcgcctgtaatcccagctactcgagaggctgaggcaggagaatagtttgaacccgggaggcggaggttgcagtgagccaagatcacgccattgcactccagcctgggcaacaagagcgaaactccatctcaaaaaaaaaaaaaaaaaaaattatatatataggatttatatatatataataaatcctaaagcccctggagtaaatctttaatcttcactagcagaacattctgttggatgatacgggctcagacggcaccctggacatctgcagggtcccgagcactgtgggtgtacttataaaccacagaccctcgctctggcctagaacacttcccaaggcggagtcctgcatccttttctgcaggtgtggcccctcctcactgtcaggtatgcccgtggtccctgcccccctgacccagagcctgctgccagctggggccccacattcctcacagcacatctctcaaccctccttgctcacttgtgaggctaaaccagaaagtacgtccagatggtcaacttcaagctagtaacgatgctaacggcacaaagtccacattagagaagggcttctcaagctaggggatgggacagggaagactttggtgccccactctcacccataggagccttctcttccaaatgcttgcccacccaagagggaggaagctgtgccaaacatcagtcgatgatctctttaaccgtggcatgggcagttgatgtaagtggactgagatggtcttcgtaaaacttgtgggttaacctattgggtcagcaagcttgaaaatcaaaaccagatcacattctgggaaattctgaggagtaaaaacatctcagaaacgtttaaatcctaatcctgttgttgcagtttgtactgaaagtccttaaatgagcaaagcgaattggacaaacatttatttcaacattacttcttaaataaaactagaagccttatcaaaccttgatttagctttacaaatgttttgtaaacaaataccaagcttattgtataacaagagaaaactaaaactcagcccctcctaagagcagggaatggtctctcacaatctacgccagtcgctgggtgatggcagcacgctgctggcctcttccctcttgcccctgcttccgcagacacacaggtggctgcctctcctcacagccctgccaccatcctggctcgaggccctgcactcctgctgggtctactcactcccacctggactccctcccacctgtcctcctctaccccacgtcctcaccgggtcactcttcctaaatgatacactcccctgaccacatccaaagtcttcaagagcccctaattctctaccaaacaaggtacaaccccttgacctgaccctcatggtgtcccactctctggcagcataagatgggttcagcctccacagcttcctggcaccccttgagacaagaggcggtgatgattaagaaggtctccaatctactctttcacctactggctgctgactccaggaagcctttcctgcctccctagacaaaaatcacttcagcctcttgacggtggtggtgatttgccagcacctcacagaacggagactttatgccacatatgaagttcttgctggacacacgtgcttcaccgcctgagactaacctacctgagggaggcatgctgccaggctatgtcagatacccagtgcatttctctacagaaaccacatgcaaaatgtgcccattttcttgggctaagtagaacctagttttcaccatacacacacagccatactcatgagaagacaaagtctaggacctgaaggctacgtgaccatgcctatgctccctacagctggcctggggtcacacgtgctctcccacgcctccccctactctgccacagtgagagcaaacctagccagatcctgatcccgctgccagcccgctgggcctgacaactacagcatctgaggaagcaggaatctgagagcagccaaaccctgctgcaccaaacttaagcataagggagaaatggctggaaacaaagaagaggacatgggaaagaagcaaggagacagccaggaagagcacctgagacctaaaaccacaacctagggccatggcctacagtcctcagacacacaccaagccactgtgtccagcaattcctggaaaaaaaatgaaggaggtttaaaaaagaacaatacttacacattaaatgaccaatattagaacagtttctgttcatattctctctgccctcttaacgtcccatttgccatgaaccaaggcaacctgggatagccctctttttagattttctgactctgaggatcaaatatcaagaactgaaacatcaagggccaggcacagtggctcacacctgtgatcccagcactttgggaaaccaaggagggaggatcacttgagcccaggcgttcaagaccagcctgggcaacctggcgagatcccatctctacaaataattttaaaaattagctgggcatggtggtgcacgcctgtagtcccagctactcaaggggccaagccaggaggatagcttgagcccggtagctcaaggctgcaatgagccgtgatcagccactgcactccagcctgggtgactgagcgagaccctgtctcatgcaaagacagaccgccctggtcctgccagtgagaataaaagaagcaagcaaggatatttaggcctgtggagaagcaagcttaactggaagcaggccctaaatggcaccatgcaagtggtgccaatgatcagcaggcacggagaacaaggtgaaactgatatacgtcactgcataagtgagatgcgagcaaagcaggaattgcaagcggagagagaagacagtgaccactctagggacaagacagggagctagaatcccatggctccagagaagccagcgtcctgaccacagaaagcgtgattagccaaacaacaaagtgctagccacaaagcaaagattccctgggcaaaaggataccatggaaaccatgtgatggaaaaagagaagcagtgccacacccatcaatcttgctgggtaagagtgtaaggatgtcattattaataagaacacttcttaccactttgaggatccagtagtggcaattagtcctcacacatacacaatttaatcctcacacatacacagacacacactcatacacatgccacaaaaacattgatcccattttatggttaagaaaactgagactcatagaaatttgggcatagctctggcttctctggtgcctgtagtgacattttcccaggagcatccagtggctaccatcggttcccttcattgacctaggcaccgtgcaggcacaattgtcaacatagcgccttctgaccgggcaggtgtggcaagcaatgcaggcagataccagagcatctccaaaccatacaatagagcacctccaaaccatacaagagcacctccaaaccatacaacagagcacctccaaaccatacaacagagcacctccaaaccatacaagagcacctccaaaccatacaagagcacttccaaaccatacaatagagcacctgcaaaccatacaatagagcatctccaaaccatacaagagcacctccaaaccatacaagagcacttccaaaccatacaatagagcacctgcaaaccatgcaatagagcacctgcaaaccatacaagaccacctccaaaccatacaacagagcacctccaaaccatacaagagcacctccaaaccatacaagagcacctccaaaccatacaacagagcacctccaaaccatacaatagagcacctccaaaccatacaacagagcacctccaaaccatacaacagagcacctccaaaccatacatcagaaaggaaaaaagtgcagacatcctcagggactcaaaacagaagaacactcaatgatcgcttcttctctcagcctacaacaatgatagctctgaggagaacatcatccacacggttcttactttgataactttgttgaggcattcgtcagccaccatcctgacatctgactctgcgtcatcactgcacagcagaaaaagttccatagcgatgcccagaagtttctgaaattctggagaatttctaagcaaaaaaagaagagaaactgtcaagaggagcctaaggtgacatgacaatgaaatgtaatgaggtatccggtgtcctgcatggaattctggaacagaaaaaggacattacatagaaattaagaaaatctgaataaagtctggacttaagttaatagcatatcaatattgattcattaaacatgaaaatgtctcacactaaattaggatgataataactggggtaactggatgtagggtatatgaaaacttcctaccctatctaatttttttctataaatctaaaactatttcaaaataaagtttattttttaaaaaagaagagattgtacttgtaaggcaattctcatttttctttttaaattttcgtttaaaaacttcagatacttcaatcctagacaacccactgctttctaccaaaagtttacttttactcttaacctacaatattcttggaaccttgaaaatcagttcagcagtctatctctcctgcccctttttaatcttgctttcggtatgggccaaagtataaccatatttcaccctaagatgccagatgatcatggtcagattgtgtttttgttgtgcgagacaaagagtcacaaaaactggagtttgtttactatttgtaaactattttaaaatgtttaattgaaagaagctgtttaggccatcatgctccaactgtctaaacaaagccaagagagagctaaactgatgagccatgtacatgaaactgacttcacagcattcagaagcatccaaaccagtaacacaaggatgttcttgaagtaatcccaagaatagcaaatcccagtaatacgggggatgtgctatttttgaagcatcaaaatgaggttgctctttcatgatcccaatctaactactctgaaaccaaatgtctctttctctttatctctaggtaaaaattgcaaacaatggttggaagatagcaatgagcctaagaggcaccaaaagtccacatcagtaatgatcaacaaacttataaaagcataaaacaaaacatgccacttagcagtatttcagaccttatctatgtggaatacagacagccatgaataacgaactgaggaaaggtctttgaaatgatagatcattcaaacactgtgctccaaagcagtactgtcaacagaaacagaatgtgagctacacttttatatttcctagctgacgcatcaaaagtaaaaagaaaacaggcaagattttcataatatttaatttaacccaatacacccaaagtattatttcaacatgtaattaatgtgaagaaataattaagatatataacattttttacagtatatctcaattcagacactaaattttcatcagaaaacctttacctgtgattagacttcataaaattcagttgaaaaagttcgtataccatttccaaccacacttaaaagttttccagtaactaaatattgatttttacatttaaattcaataaaatagatatagggctaatcagcttatctatatcttcttgagagagctttaatagtttctgtgtctttcaaggaactcatccatttcatctataagttgtcaaatttattggcataaagttgttcataatattaccatatagtcctttttatttatttatttgttttgagatggagtcttgctctgtcacccaggctggagtgcaacggcacaatctcagctcactgcaacctccgcctcccaggttcaagcaattctcctgcctcagcctcccaagtagctgggattacaggcacacagcaccacgaccaactaatttttgtatttttagtagagacagagtttcaccatgttggccaggctggtcccaaactcctgacctcaggtgatctgtccacctcggcctcccaaggtgctgggattacaggcgtgaaccaccacacctgcctcatacagtccttttaatatctatataatctatactactgtcatctccctcattcctgatattgctaatttgtgacttcactgtttttcctatcagctttaccaatttattgatgttcttgatgaaccagcttttggttttattgatttcctatgtatttttgttttctattttactgacttctgctcctatctttatgatgtccattcttctagtaactgtttttgtttttgagacagggtctcattctgttgcccaggatggaacacagtggcacaatcacagttcactgcagcctcaacctcccagactcaagcaatcctcccaccttagactcctggttagctgggactacaggcacatgccaccacacctggctaatttttttgttttttgtagatatggggtctccctaggctgcccaggctggtcttcaactgccagtctcaaacaatccacctgcctcggcctcccaaagtggcagaactgcaggcataagccaccgtacctggcccttctggtaactctggattccatttgcttgtcattttcaagtttccaaaggtagaagctgaggtcattgatttgaaatctttctttcctaaaacaggcatttaatgctagaaatttccatttactatgctgtaacagcaccccacaagtttagaaatctattgtttttatatcagtcaatccaaaagactttcaaatttcccttttgacttcacttctgacccatgggccatgtggaaatgggtttttccacatatctgaggcttttccaggttatcttcctataatatattccaacttaatgatactgaggtcagaaaacatactctgaataatttgaatgcttttaatttagagacttgttttatggcccagcatctgctctatcttggcaaacattctgtgagcacttgagagagtgtctcttctgctggtgctgggtggagtgtcctgtaaatgccaatgaggttgcacaggggacagtgttggtcaagtgttctagatccagatattatggctacgtgttctacaaatcattgagagcggctactgaaatctctatcactgtggatttgtctgtttctacttgtagttctgtcaggctttgcttcatgtattttagctctgtagtccggtgcataaacatttcagcttgctatgccaggctgatgaacgaatccccttcatcattatgaaatgaccatctcatcctgggcaagagcctttgctttgaaatccactttgtctgatattaacagaaccagtctagcttgcatctaattcttgtaagcacagtgaacttctttccgttctgttacctgtaggttatttttgcctttatatttagaatgtgtttcttgcaggcagcagcatataccgagtcttacttttccattcaatctgaaaaatcgctgccttttacatgtaatgtcctttttgacatagttaggttgaaatctaccatcaagctctttctttcctttatttgcctcttcccctatttctggcttctttgggattcaccatttttattattctaatctccttttttggttcattagctataattccttgttgtgcttttagttgttgcttaattgtttatactatgtatcttcatcacaatctaccttattacaccatttcacatgcagcataaattagtttcctgcagctgctgtaacaaattaccacaaactatgtggcttaaaagaaacaaacaaacaaaaaattttttctttcacagttttagaggccagagtccaaaattagtatcactaaactgaaattaaggaattccctcgccctcgccctcgccctcgcacagtctccctctgatgccgagccaaggctggactgtactgccaccatctctactcactgcaacctccctacctgattctcctgcctcagcctgccaagtgcctgggattgcaggcacgcaccgccatgtctgactggttttcgtgttttttggtggagacggggtttcgccgtgttggccgggctggtctccagctcctgactgcaagtgatctgccagcctcggcctcccgaggtgccgggattgcagacggagtctcgctcactcagtgctcagtgttgcccaggctggagtgcagtggcgtgatctcgggtcactacaaccttcacctcccagccgcctgccttggcctcccaaagtgccaagattgcggcctctgcccagccgccaccccgtctaggaagtgaggagcgtttctgcctggccgcccatcgtctgggatgtgaggagcccctctgcctggctgcccagtctgggaagtgaggagcgcctcttcccggctgtcatcccatctaggaagtgaggagcatctctgcccggccgcccatcgtctgggaagtggggagcacctctgccccgccgccccgtctgagatgtgaagagcacctctgcccggccgtgactccgtctgggaacttaagaatgtctctgccccactgccaccccgtctgggaggtgaggagcgtctctgaccagccgccccgtctgagaagtgaggagcccctccgcccagcagccgccccgtccgggaagtgaggagcccctccgcccggcagccgctccgtccgggaggtggggggcagcccccgcccggccagccgccccgtccgggaggtggggggcagcccccgcccggccacccgccccgtccgggaggtggggggcagcccccgcccggccagccgccccgtccgggaggtggtgggcagcccccgcccggccacccgccccgtccgggaggtggggggcagcccccgcccagccgccgccccgtctgggaggttggggggcgcctctgcccggccgccccatctgggaagtgaggagcccctctgcccggccgccaccccatctgggaggtgtacccaatagctcattgagaacagtccatgatgacggtggcagttttgtcgaatagaaaaggaggaaatgtgggaaaagaaagagagatcagattgttactgtgtctgcgtagaaagaagtagacataggacactccattttgttctgtactaagaaaaattcttctgccttgggatgctgttaatctataaccttacccccaaccccgtgctctctgaaacatgtgctgtgtccactaagggttaaatggattaagggcggtgcaagatgtgctttgttaaacagatgcttgaaggcagcatactcgttaagagtcatcaccactccctaatctcaagtacccagggacacaaacactgcagaacgtggcagggccctctgcctaggaaaaccagagacctttgtttacatgtttatctgctgaccttccctccactattgtcctatgaccctgccaaatccccctctccaagaaacacccaagaatgatcaataaatactaaaaaaaaaaaaaaaaaaaaaaaaccaacttaaaggggtaaatgatatcttaaaaaaaaaaaaaaaaaaggaattggcagcaccacattccctctggagtaggctctaaatgagaactgctccgtgcctcttccagctttggtggctgctgcattccttggcttatagcttcatcactccaattttcaaggccagcaccttcaaatctttctgttccatcttcacagggccttctctctgtgtgtaaaatctccctctgcctcctttttatatatatgtgattgcatttagtgcctacccagatcatccaagatagccccctcatctcaagatcctgaatttaatcacatcataaaacaattttccatataaagtaatatttacaggctccagggattaggacttgatatcttttggggaaagaggggagcattattctgcccagcgcaaatacatgtcaatttctgctcttccagcctttatgctattgtcatacaattcacttctacgtgttacaaacactgaaatatattatttttgttgcgaacaatttaattaatctctttttaatattaggtagggtcagagtaacgaaacttagtctggggctaggtgggcaaacccttctgagtaccctacctgctctatgagagctgaggttttccactccaactggtgtgattagaaattcttcctggccctgtgtgactttcagcaactgttccttctaatcctttcaggtggctctacctccagccctgggtcatttccgcacaagcaagtgctcgtcagtactcagctacacacatgacagggtactgagagggcagggtgcaggtctccggagctccctctgcagctctcttccctggtattcttccatatgggctctcaccaccttgcatctctgcactcccagctctgcctcctcaacccagcaaaccactggctcagcctcagtctcctctcagtttttcctcttgccatgaccaggcagtaatgtaaggaaattgtagggctctccacattcattttcctgggataactattcttctttgcctgatgcccaataacttgaaaaccactgttacatatatttcttccgttttcaactatttcaaggcaagaagataaatgctgtccttgttattctatcttagccagaagcaaaaatctttcattattttttaactgaattttttaacacattgttaatatattttccagtcacaaatataaatatctattggtcagaagtggtggctcatgcctgtaatctcagcgctttgggaggccaaggtgggaggatcacttgggcccaggaattctagaccagcctgggcaatacagcaagatctcatctataaaacatttaaaaattagccaggtatagtagcactgcctaaagtcccccaggtactcaaaaggctgaggcagaaggatcacttaagcccaggagttcaggctgcagtgggctatgattgtgcaactgcatcctgcctgggtgacagagtaagatcctgtctctaaaaaaaatttttttaataaaaagtaaacaaaatataaatatctatgaatgttaactaacattctcttgtataaatgtatctggccaggcgcagtggctcacacctgtaatcccaacactgggaggccgaggggcgcggatcatgaggtcaggagttcgagaccagtctggccaacacagtgaaaccccatctctactaaaaatacaaaaaattagccgggtgcggtggtgtgagcctgtaatcccagctactcaggaggctgaggcaggagaatcacatgaacccgggaagcagaggttgcagtgagccgagatcgcaccattgcactctggcccaggcggacagtgcaagactccatctcaataaacacataaataaatatatcttaaattttcaatccccttttagtggtaggccattaaggttatttttaattttctaatgggatgaagggcactgcaccaatatcattacacactttcctaggggtaagcaccctagaggtaaaactgctaggtcagacatataataatctaaagctttatattttcccaaattgccttcttagaaggttgtatcacctctgacaaaaatctgaatattcttaatgtttgccaatttgacaggtaaaaaaggttcttatttttgtttcagtttcagtctactgattactagtgtcctaatcagcttgagtttctataacaaaataccacatacagactgggtggtttaaacaataagcacttactcgtcacagttctggaggctgggagtcggagaacaaggtgccgacaggtcgacagtgtttttcttaacgatatttataactgctctttacacaggctagtaacctttgatctatatgctgtcaatactttccccaagttcaatttactttcaattttgttgaaggtggattttgacatattgaactatattccactcaaaacagttttttcctttataatgttaaccttcctcaaactaagattacattttttaaagaaattatttcattttttcacatttaggtaattaatctgaactttatgtttgtttgcaatatgaggtagagatataatgttctcccaaagtcagagaaatgtatcatttccctcatttccctaatacatatatgttacacccatcataaattcatacagatacacacatacactcttctttctgttctatacctgttttaacatccaatcactattttaatgtcacatacattaagtctcaccatattagtgttgatttctttttcttttttctcttttttcttgagacagaattttgctcttgtcgcccaggctggaatgcagtggtgcgatctaggctcaccgcaacctgtacctcctgggttcaagcaattctcctgcctcagcctcccaagtagctgggactacaggcatgcaccaccacacccagctaatttttgtatttttagtagaggcagtgtttcaccgcactggtccagctggtctcaaactcttgacctcaggtgatctgcctgcctcagcctcccaaagtgctgggattacaggcatgggccaccacaccaggcctggtgatgattttgagatattctttgcaattatgtatttattcttgcagtgaacaagttcaaaaatacctctactagaattttgatcaagattattttaaatttctgtgttaatttagagaaaattcaacttagtaatataaaatcttcctatctagaaagtggtcacctatatctttcagaaacattaacagaagtttttataaagtttttgcatatttatcgattccttagagttcgatatattggtgctactgtgaactagatctttaaacgttatattttctagctgatttatgctaatatatgggagatctatggatttttgtatatttatgtttacctagccaccttatcaaggtacatattagtaagaggttgctcaagtaagcattcctgggtattcccaagaggatacttgtgaaaaatgtgtagtccctacctactcaaacagaatgcagaagtatgtttgggaaaaaggacagtgaggtgccttcattactgtatttttaacaaattttccagatgattttgatgctcatccatacttaggaaccagtaacttagaccactttagagagcttaaagcagactacattttcacaatatacatgaagttttaaatgacttcctacattgaaaacgtcagaagctgccatttatataacctcattagagacaaaaattagtctagcacaaaagctataaaaaagttccaaaagtttaattatattttaggagagttaacaggaaacagcgatgagcaataagtttccataaaacatatttacataaaatatcaccttcagctatatactctgaaatccctaaaaagtatagagtgtatcctatgaaaccaagaataacctctctgactccaaaaactccttttaacatgctcttctgtagaacaagcataatgaactctcagcattactccataaaaacaagagacagactaatgtgaaaaccattaacagctattattttgatttaatatggcatatagaaccacaaatcaatcttaagatgtctcaacatactttactaatatatgaatataagccaacattccatgaattccatttgaaaattatcaaaagacaaaatgacaagaataaagcctgacgcactcagattgaaagagatcttatttcctgggtcaataagctttcagagagaaattatgttctctgagacctggatggtggagatcagatgaacaatgaccaaatgtttgccaagtatttaaagtcatttcacaaaaaaagtaaagatggccaggggcagtggctcacgcctgtaatcccagcactttgggaggccgaggcgggcggatcacgaggtcaggagatcaagaccatcctggctaacacggtgaaaccccatctctactaaaaatacaaaaatttagccaggcatggtggcgggtgcctgtagtcccagctacttgggaggctggggcaggagaatagcgtgaacccgggaggtggagcttgcagtgagctgagattgcaccactgcactctagcctgggcaacagagcaagactctgtctcaaaaaaaaaaaagtaaagataacatatagctttggatgatgggcatcgcaatgggatacgcttcccgctcaggtggctaatgaacatatctatgcagttgctttttcacagtgtttcacatgtaccatctgatcccacaagaactgtgtaactagggattacatttcaaaaatgagccagtaaggctcaaacacgttacagcttatctaaagtcacccagcttacacaggtagcagagatagaattcaaacctttttttttcctacttttatcatagcgttgtattctacaatagcatgctaacttagaatttttatatttttattttcaggacatatgctcatttgttatttcattttcttcccacaacatttccacaaattagacagaaacagaacagaatcatacacagtatttcacaaacaacagaaatgagttaacctaaaatgaaacggttttgtgaaatcactttgaaagtatataatacaaatgcacagaggcattaaaaataagcagatcaccaaaaaaaaaacacaaatcctgtaggaatccacttacatgaggtctccagagcagttacactcatacagacagaaagtagaaagggactacaggaaagaatggatgatagggagtttaatgaagacagatgttcagttttgacagaagaaaaacttatgaagtagatggcagtgatggctgtacaacattacgaatatatatactgaactgtacccctaaaaatggttaagacagtcaattttatgtgcattttaccacaataaaaagacaagagagggccgggcgcggtggctcacgcctgtaatcccagcactttgggaggctgagttgagcgggtcatgaggtcaggagatcaagaccacggtgaaaccccatctctactaaaaatacaaaaaattagccgggtgtggtggcgagcacctgtagtcccagctactcgccaggctgaagcaggagaatggcgtgaacctgggaggcagagcttgcagtaagccaagatcatgccactgcactccagcctgggtgacagatcgtgactccgtctcaaaaaaaaaaaaaaaacaaaagtgaaaagcaatggccaagaggaaattttttgaaaaaacaaatgaatcaccgggcgccctggctcacgcctgtaatcccagcactttgggaggctgaggcgggcagatcacctaaggttgggagttcgagatcagcctgaccaacatctctactaaaaatacaaaattagctgggcacagtagcacatgcctgtaactccagctacttgggaggctgaggcaggagaatcacttgaacccaggaggcagaggttgcagtgagccgagatcacgccattgcactccagcctgggcaacaagagtgaaactccgtctcaaaaaaaaattaaaaaaagaatcaccacacgtttttgtcagtactaaaatcaagattatttgtctaaaaatttttttctgactgactataaaggctttttctagcttctaccaggagaataacatgaattatttattccaagggaaagtaaggcaaggcaactatttcacgcatgcccatgtgggtaacagaattcagatatcataggtgaatatgtctcctactgagccattggaaacaggcctaaatatatttaccatctacagctactaggaacaacggtcagaaagatagtcaaaagcaaagcagctacaaaagaaggtgctgctagttcatcccagtgagaaagatcaagcaaggaaagctgacctacagtcaatgccccacgatccccactaatcccgaagcacagaggagtgggctccagccactgctaggagcagaggtacaataggacagcaaactgccaagaaaaagcaaataagagagacaaactgaactgtcttgtgctgttcctactattgcaacaaatgcaaaaatatcaaaccatagatggttttaaaataactatagttgctaagggtgttaactaaacataaacatgttgttcaattaccataatggttttaatttttgcataaaagattacaaaaagggaacattattcatttcagtgtctggatatccttgtatatagccagaaatatgggaaaagggtccttcttcatcttaaatggatttctgaatccatttaaaatagctgggacacaaagaatattctagcccattaagactgaaaatatacaaagttcttattttctctagacagttcaaagtgcaattacctgacagactgtgccactatgttttcacatattgtcagacaatgattcacacggtctttcttggtagctgaaagttctttctttctaaaaataaaaaaaagaaggaaattaatatgtgttgaattacccactccacttagttctacacctcattcattcattcagtgagtgtttctcgactactatgaataaaccgttatactccatgttgcgggcagaatggggatctggacagggaagcacagggcacgagttcaccaatggctgtcaagctacgctgctcacagaaaaaacagatgatgttactaaagcagttcatttcccccattttactttattttacttttttttagagtcaggatcttgctctgctgcccaggctggagtacgatagcacaatcatggctcactttagccttaaactcctaggctgaaaggatcctcccgtctcagcctcctgagtggcgcggaccacaggcacgcaccactgggcctggctaattttttcaaaatattttgtagagacggggcctcacgatgttgcccaattgctcaaactcctggcctcaagcgatcttcccatcttggcctcccaaagcactgggattataggtatgagccaccatgactggcctcacttcccccattatagagagaagaaattgaagtgccaaccatgacatgcccaagatcacacagatatgaagtcatacagccagcatttaaacccaggtcttctggctttaaatctcctctgtatttcaccaatactcaatcaatttcacgtttgaatcatgtgttaacatcactaaagccaaactgcatcttacaaccagtggtatagtttgattagaaactttctttctttctcagcagtacagaagatgatggcatagattacaagagatgggaaattcaattagaagaaacacagtctaatacctactctatatataccaggctgccttcagttctcaaaatcgttaactgactacaatcaacataccacacagacctcagtaaaatataagcaatggctaactgcttctatgtccccaaatagctgggaataagcctcctattaagacttctcagccaagcaaaaggagataaacagcctggcgaagatgatcaggctaaagatgcctccttcccatccaaacctatggcttcagatgtcttcacagttggcactatcaaaataaagtagagaggggtgatccaaaacataggaccaactaaaaacaactaaactaaaagactactaagtttctgagaaaattgtattaccaaagaaataaaaaatctaacttaaaaacactgccttgctatctcattttgtccaataagcaaacctggaagtttaagaaactaaaactaattccttcccccatggaatttagttaagatgatgaactgataactcaaactgacttgttctacatgaaaagtaagtatggtgattaagtgaaaaagaaaccaccttgctctgagcaagaactggaaaaacagggtaagaacagtcctggcttttcaatcacttttggtaaatgtagtcactttcacttcaccttcaaaattaaaacaaacggccaggtgtggctcacgcctgtaatcccagcactttgggaggctggggcagcagatcatctgaggtcaggagttcgagaccagcctggccagcatggtgaaacgctgctctactaaaaatacaaaaaatagttgggcgtggtggcgggcgcctataatcccagctactcgggaggctgcggcagaagaactgcttgaacccaggaggcagaggttgcagtgcaccaagattgcgccattgcactctagcctggggaacagagccagactgtctcaaaaaaaaaaaaattaaaacaatcctccgccagcctcctctaattgtgtaatcaagcaatctgcacgggcacacaagcgtaaggaggggcatgtaaactcaaggacactacagcattctatttatttatttttttttttcccccgagacggagtcttgctctgtcgcccaggctggagtgcagtggcgcgatctcagctcactgccagctctgcctcccgggttcacaccattctcctgcttcagcctcccaagtagctgggactacaggcacccaccactatacccggctaattttttgtattttttagtagagacggggtttcaccgtgttagccgggatggtctggatctcctgacctcgtgatctgcccatctcggcctcccaaagtgctgggattacaggtgtgagccaccacacccggcccagtaatgctgtattttaattgatcttggttttttttttttggagatggagtcttactctgtcacacaggctgaagtgcaatggcgcactctcagctcactgcaacctctgcccctcgggttcaagcagttctcttgcctcagcctcccaagtagctgggactacaggtgcacaccaccatgcccggctaatttttgtatttttagtcaagatggggtttcatcatgttggcccggctggtctcgaactcctgacctcaagtgatctgcccaccttggcctcccaaaagtgctgggattacaggcatgagccaccacgtccgacctgatcttgatgttttaatgtcatgtgtgttggattatttggatgaacattacctctggtttgtttcactctgaacatgggagactgagacacaagtatcacttgaacccaggaggcagaggttgcagtgagaaaagatcatgccactgcactccagcctgggcaacagagcaagactctgtcgccaaaaaaaaaaaaaaaaaaaaaaagacaaagcatttccattacaagtattcccctgtgttgtccttttataaccacattcacctccctctcttttctctcctctgccaccactaacctactctactaccccatctctaaccccaggcaaccactaatctattctccatccctaaaactgtgccattgcaaaaaaacatagaatcatacagtatgtataaccttttgggattggcttttttcattagcataacttcacctaaactgttgcatgctatcagtagctcattcctttttattactgagtagtttaaccattcacctgttgaaggacatctgagctgattccagttcttagatattatgggtaaagctgctatgcatacttgagtataggtttttatgtgaacattaaggtttcatttctctaggattaatgcccaggattgtagttgctgctgggctgtatactaacggtatgttcagttttatgacaaactgccaaactgttttccagagtggccgtactatattatattcccaccagcaataagtgacctagtttttctaaatcctcaccagcatgtggtattgtcaaagtgatcttttcatctaaatgcatatatatacatatatatgtgtgtgtgtgtgtgtgtgtgtgtgtgtgtgtgtgtgtgtgtgtgtgtgtgtgtgtatatttagagacagggtctcactctcttgcccaggttgtagtgtagtggcataatcatagctcactgcagcctcaaactcctggactcaagcaatcctccagcctcctcagcctcctgagtagctgggactacaggcacacaccactatgcccagctaattttttaaagttttttgtagagaccttataggtgctgctatgttggctatgctggtcgtctggcctcaggcaatcctcccaccacaccgtctcaaactactggtattacaggcatgaaccattgtgcccagccaaaatgatcttttaaaaacataaattaaactacttgttttgaccacacaagcttatcttggtgcacaagacgctcgtctctaacctctcatctctcgcagcctcatccttatttctgcccttcaccttacttcagccactggcctccttactggttctcaaacatggaaagcatttctgccttctgttaactctgcctggacctctcttctcccgctatacacatggcttgccccctttccactcaaatgtcaccttctaaccacagctctcctttgtgccctaaataaaattgcacattgtctctcccctcattcggttgtttttctccatagtggctgctcagatgaaagggtccttccagttcatctaagcgagtcccactaccaatggctgggagctctccgcaggctcacctcagctcactcatcacagctacagaaatgctcaacggccctacagcagataagcaaggccacctcagctacacctggacacatatgagcaacacaggtcttcctcccaaatgcttgcattgttattagcaacaacaaaggtaaggtctaagcacctacagtggagcttcccaaactccaatgtgcatgtaagtcactcactgaacctgttaaaacacagactctgatttgtcaggtcaagcagagagagtctgcttatgagatcccaaatgataccaaacgactgtccctgagacctcactgtgatagcaaggacctatggacatatcatgtctctaacatacattctagcccccaaattgatccaatttaatacaatattaaacagtgctttataaggtattttatttttcctccttgttgtctgaataagactaaatgttttgagtgtggatccattcaaaggtagtttatcaagtggttgacttatttacaggaaatggaggtgatggggatggggacttctcaaggtagagagaatatgtcaccagcacattctacagccacaaaaatgtgagacctttgcctttacatctccaaaagtcctcttttaaaaagaaattctaaaatattacatagcaattaataagaattacaggtactgctatggaacaatatctatgacacattgttaagtaaaaaaatacatatgtaatgtgatctcagtcaagcaaacaaaaaatgacacatttaaatgcttgtatatgcatattaaaatctgggaagaagacacaagaaacacttttgttcttaggaagttagacaaagatgacagacttgcaagaagggctttgtttttcatctgtgctgcttgaagatatttttataatgtatatgtgtaacttttataattttcaaaactagtttaaaaaaaaaacaaaaacagccaaaaaagaaatgctttccagcagggtgtggtggctcacaccctgtaatcccagcactttgggaggctgaggcgggtggatcacctgaggtcaggagttcaagaccagcctgaccaacatggagaaaccccgtctctactaaaaatacaaaattagctgggtgtggtggcgcatgcctgtaatcccagctactagggaggccgtgcaggagaatgtcttgaacctgggaggcagaggttgcagtgagccgagatcgcgccactgcactccagcctgggcaacaagagtgaaactccgtctcaaaaaaaaaaaaaaaaaaaaaaaaagaaatgctttccaaatgtggtcctatcatattttaacctaggagtgggaaaactataacctgcatatttttggctagttcacaagctaagaaatgtttttacatttttaaatggttgaccaaaataatcaaatactatctcatgacaggtgaaaattatatgaaattcaaacttccttgtcattaataaaattctattggaacacagacactcatacatattgcttatggctactttcatgctacaatggcagagccgcgtagctgtgacagagacactgtgcccacacagcccgaaatacttacaatctgaccatttacacaaagtttgcccatgttcataggtggaagacaatattgttaagatgcgaatactccccaagttgatctacagattcaacacaatccctctcagaatcctacttggcttctttgttgaaactgacaagctgatcctacaattcgtacggaaatgcaagggacccagcatggccaaatcaatcttgaaaaggaacaaagttggagaactcacatttcatgaatttaaactgtgacacaaacttcagtaatcaagactgtatggtactggcacaggatcgacataaagaccaacaggtagaactgacagtctagaaataaatttatacaattaaggacgattaattttcaacaagggtactaagataattccatggggaaagaatagtctcttcaacaaacagtgctgggacaactgaataaccacatggaaaagaataaagttggacttctacctgaaccatatataaaaattaactcaaaatggatcagacttaaatgtaaaactctaaaattcttagaagaaaacataggagtaaacctttttgactttggattagacaatgatttcttagatatgacacttgaagcacagcaaccaaagacaaaatagataaactcgacttcatcaaaattaaaaacttttacacttcaaaagacactatcaagaaagtaaaaagacaatccaaaggaagggagagtttttacaaatcatctatctgataagaatccagtatccagaatatataaagaactattacaattcaacaataaaaatacaaagggaaaaaatgagaacaagggtttgcaaggtaagtataagaaagagcctgggttctgaccgggtgcagtggcccaaacctgtaatcccagcactttggcaggctgaggcgagtggatcacctgaggtcagaagttcgagaccagcctggccaacatggtgaaaccccatctctactaaaaacacaaaaattagctgggcatggtggtatacgcctgtaatcccagttacttgggaggctgaggcagaagaatcacttgaacccaggaggtagaggttttagtgagctgagatcacatcattgcactccagcccgggtgacaagagcgaaactccgtttcaaaaaaaaaaaaaagaaagagcctgggttccttaacttattgttgaatttccccagacttatttttgtcttctgataagctcttgcttgttaccagtttaagctattgcagcaggattttctgttacttgcagctgaatacaaacctgataacgcaagctactgctaaattgttatacttagcagagttcaacaagtgcagttggttccgcattcaaaatccagtcagtcattcctcacactgcccacagccgacagccggtaccctgacagaacccaccatgcttatctgagcactgcagtggcttcctaactggtttctgcttttgccggtgttccccttcactctgttgtcagccagagttcacttaagattgaaattcagatcatgctactcctctgctctaatcctccagtgacatcccatctcactcacataaatgccaatatctttattccatctacaaggcaagtagtattggtctgatatggcactcccttgacctcttggaccttacttcttactacaaatgtccccctcactcaattcacccaactaaaatgacatccttgctattcctgaaacaggaagattttggacctgttccccccatctggaataccactacttcatacacccttacactagactcttaactcgcttgaggtctttactcaaaagccatcatctggccaggtgtgatggctcacacctatagtcccaacacattgtgaggttgaggtgggaggatcacttgagcccaggagttcaaggctgaagtgagctacgatagtgatactgcattccagcctgggttaaagagcaagaccttgccccccaaccccaaaaaaaaaaaaaaaaaaagctgtcttctcagtggaccttccctgaacaccgtatttaaaatatcaacactggccaggtatggtggctcatgcctgtaatcctagcactttgggaggccaaggcaggcagatcacatgaggccgggagttcgagaccagcctgctcatcatggcaaaaccccatctctactaaaaatacaaaaattacccaggcgtggccgggcacagtggctcatgcctgtaatcccagcactttgggaggccgaggtgggcggatcacaaggtcggcggatgacgaggtcaggagatcaagatcatcctggctaacacggtgaaaccccgtctctattaaaaatacaaaaaaattagctggacgtggtggcaggcgcctgtagtcccagctacttgggagactgaggcaggagaatggcgtgaactcgggaagcggagcttgcagtgagctgagatcgcgccactgcactccagcctgggcgacagagcaagactccgtctcgggggaaaaaaaaaaaattacccaggcatggcagtgcatgtctataatcccagctaaacaggaggctgaggcatgagaatcacttgaacccaagaggcagaggttgcagtgagccaagatcacactagtgcactccagcctggctgatagagcaagaactgtctcaaaaaaaacaaaacaaaacaaaataaaataaaaatgtcaacacttagtgctacagctcttttggaatttgtctagcaggctttctgggttttgctggaaagcccttaacaatttttttaaaaataaaaataagttaacactcgattaaccctgacatttccctatccccttccctgctttgaagttcctccacgtattaacgtactgtatattttacttatctatcttgcttactgtctatgtccttcattagaatgaaagcttcacgagggcagagctttgtctgctcactgctgagccctgcacctataacagtgccaggcacatagtacatgtttagtaaatatttactgatgaatgaataaagtcagggaaacaccagataggaatctgaaggagaataagaaactgccagaagcaagtattaattgcctcctaattactgtgaggaccctcccaagcatgctagatttgctgagcctgcagccagccccataaggaactcctgcatcctgtatgctgagcagagcacaaacactcataaactgaggcccatgcatggcgtgacaccacagttccacaccaaagagcaagagccataaaaacagaacagatactttctaaattgctttcatcaatcttactttgagaagaggattttttggctgaagcacgtgaacagaactgccaaaatccaaactttgtgagcagtgtttgttactcaaaattagtgaatacctcctttctcaacagcaaaatacagagaaatatgacaaatatgcattttatttaaaataactataaaactataaataaacctaatgcagttgatttcagagcatgctaagaacctttaaaagttattattctagccaggcatggtggctcacacctgtaatcccagcactttgggaggccgaggtggacagatcacaaggtcaggagttcaagaccagcctggccaacatggtgaaaccccatctctactaaaaatacaaaaattagctggacatggtggtgggcgcctgtaatcccagctactcagaaggctgaggcaggagaagcatttgaacctgggaggcagagactgcagtgagccgagattgtatcactgcactccagcctgggtgacaatgtgagactacatctcaaaaaatatatagatatatattattctaaactacttttgtttttagagcattttaaatctatcttacaatatgaacaggttatatctggcaggatacatgaggaactgaaatagtgcttgttcttggggacaaagttaggtactcagaggaaaggggtggaaggaagatattttaattattgcccttttgtaattacagaatttgtatcatgtcaatgtattacttatgcaaaaataatacattaaaaaaaattttttttgagatagagtctcgctctgtcacccaggctggagtgcagtggcgtgatctcaactcactgcagactctgcctcccgggttcaagcgattttcctgcctcagcctcccaggtagcttggattacaggcacgtgccaccatgaccagctaatttttgtatttttagtagagacagggtttcaccatgttagccaggctggtctcaaactcctgacctcaggtgattcgtccacctaggcctcccaaagtgctcggattaaaggtgtaagccaccttgccagtcctgattaaattttttaaataaggtaatcatatattaccttaaagtaatgaaacaaaatctatctcctttgtcaaggcagcaaaggaaatttcttgatacccatattttgaagataagcaaatgcaggttctgtcaaatcagcataagaaagagaaggcatatttttagaatgatcaagtgtctgaagcagcccagcagaaaggtcttccttcccatcaggagccctgtttagtgtttacacaagatacatgcaatgtgtgaacttttatgacacctacctcctagaaaagcactacagtaaatttctggatgagaaattacttactgaagagataagccaaattgttttaaaatttctccaaatatccaaaaagtttttccatcctttagaataatttattcctaaattttattccaacaaataagctaacactgctctccgaatcattttctaattaaactttgaagacgagacaaggatcataacagaaacaaagaacaagaaatattactaaaaattaatcagtcttaacagagatattcttaccaaatgccatctgggacacatccagatcggaaatagaatactgagaggtaagagaaaggcctgaactgcaccagagtacttcctaactcctactgtacactcgacacacagacttccagggaaagtcctggggttccgctagatgttttaatggtctctcttttcctgtttcaaaaattctccccaagaacaagcaacagaaacccctagcttccaaaaagtaacaagctgtcagcaatgaagcaaacagaaaccctttcactggcacatctgagatgcccacggagtctgcggaccccccgtattctggcaagcctgactggaatactggtaaaatgtacacctcattcatccctcggcaattaacctccccatcagcaacgtgttggttttattcccaacacacataggcaaaaaacttcaatcaactcttcctaatatttaagataatttcattaatcaccacgtaagttcaccactttacttggcaaccacaactcattcaaacgcctgcagaccaacttaggcttagatgagcagatctcttaggtggtgcttaaaatcgtgttactaccaccgtgatcatgaactaaatgaaatgtcctgacaatgtaggaagagcctcaaatctcaggctgttttaagtgccactaggaaaagaaatctcccattggacgcgccctcactccccgccccccccctgccccgccactcccgccgaggcgtcctaaaagcattatgtcatccactgcccccacatctctccagctccaaaccccgcctcctctcgaagtgtcccgcgcccccagccctcttccctctcagactagaagagggaagtggcactgagcaaatctcggctcctccaagttctcttcacaacgcagttaaaagaacccccgccctggtttctcgcaaataaaaagaaacaagttctcgccccaactcttcgcatcctgcgaagggcgagagggctgaggccgtgactcccctcggtgaattcaggacaggccccaacaaggctctgcctcccctcgcgagaggacaagggaagacccaagtgagggagcggggctgaagtgggggaaggcctcgccccaggagggggcgggtgtccctcatgggctctgggttgctgggtcactctgtctctgcggggccgggggttcgtgtcgccggcccgcaggctgcagggttaccgccatccccgccgtagcctgggacccgccgggacagggagctgcagcgggcccaaactcacggtcggtgcagcggctcctcagccacagccgggccgggtggcggcgggggcggcggcgggggcggctgcggctgaggcagcagcggctgtgcctgcggcggcggctgaggaagctgaggaggcggcggcggcggcggcggcggtggcggctgttgctgctgctgctgctgctgctgctgctgctgctgctgctgctgctgctgctgctgctgctgctggaaggacttgagggactcgaaggccttcatcagcttttccagggtcgccatggcggtctcccgcccggcacggcagtccccggaggcctcgggccgactcgcggcgccgctcagcaccggggcaatgaatggggctctgggccgcaggtaaaagcagaacctgagcggccgtccatcttggacccgtcccggcagcccccacggcgccttgcgtcccagacgctgcgccggcggaggcggggccgcgccggcggaggcggggccacgccggccagcatgattgacagccctagcctgcggactctgccaatggctggccagggaaccagcccgcccctgcccccgcaggttctgcctcacacagcaaggccgctgacagcgcagcgccccacccgggcgaaggcgcggggctcaacggagaggggacggggcgtggtgagactgtaatggggtgaggcgaagctgtgtgtgaagtgtcgcggcgaggcgggacgaggaagggacggggcgggactgcatggtaagggaggcgtggcgatgcggggggcgtggcgatgcggggggcgtggtgaggtaggggcgtggcgaggccggggcggggcacagcagggaggccgcctgaggggcggggcgagacgggggcggggcggggcgatgctggggacggggacattaggcaggccggctgaggggcggggcggctgaggggcggagcgggataggggaggggactggccggtgaggggtggggaggctgggggcggggcaggaaggtgagaggtggggcgagggaggggtggggcgcggaggggcagggccatggaggggctcgcccatgaaggacggggccatggacggggcggggccgtggagggggcgccgagcgcgggcgcaggcccatgcggaaaggatcccccgccgacgcctggagcggggcgacagccggccgtggactctgagccgaggtggccttggggtttgccctcccgccacactggcccgtggccagagccatactcacccggacagccctgcggggagccagctgcggggctctctgcacggggagagggtgggcgagctcctgcgcagagcgcagagaatgcgcgtggtcggcacgacctgaggaccccaagtgtgacccccaccccacccccagtgagctggagaggcccctgcagggcggtgtccacaggcctggcgccccccatcggtcccagcgcagcgccccggaagggaggagagggtctggggcaggcctgggtggtcagcgcctgctgcccacagaggcactgtgattagtgcagcgagaagcagctatggccacaagatgccgcccacaggaatgagtcccgacctgggggcgtttctttatgggagtgcacccctgctctgaccttccggcaggacccccaaggggcgtcattcagcagcagctcagcagaggtctgtggggcaccccctcacgcctgggacacaggccgtggcgggcagggtcctggtctccagagcctcctgccttttgggtggtagaggggcaaacggagagggcagctgtccagcctgcccagcagggagtaaggttggcctcagagacaaccgcccagccggggggtgatgcaggcagagaggagcccagtaaagcctactttagccaggccacacctgcaacccagagtcccctgctctgtggccacaaacagcacctccgccttgtctcagagcctgtcctaaagggaaacccagcattgtccccagtggggtagcagtagcctcccttttcttgagaaggacagcagagaaacagctgttagttcccagttcttgggaggctgatgtgggaggatcacctgaacccaggaatttgaggctgcaagtgagctaggattgcaccactgcactccagcttgggtgatagagcgacactgtctctaaaaaaattaagttccagcgaggtgcggtggctcacgcctgtaatcccagcactttgggaggccaaggcaggcagatcaccagaggtcaggagttcgagaccagcctggccaacatggcgaaaccctgtctctactaaaaatacaaaaattagccgggtgtagtggtgcatgcctgtagtcccagctattccggaggctgaggcagaattgcttgaacctgggaggtggaggttgcagtgagccaagatcatgccattgcactccagcctgggtgacaagagtgagactctgtctcaaaaataaataaataaataaagttcccagttctctgctgttaataagggcctttgtccactgtgtcaggcctcaaggttgttagttacctcagtgggcagactcataagatggccccagcacccctcacctcctggtattgacacccttgtatgacccctccccgtgagcttgggctgtacctggtggcctgcttctaaccaatgggcaaaggtgatggaatgtcaccccatgactaggtcgcaaaagggtatgacttcagtctccctggccctctctgttgccttcttggcatggatgctctgatgaagtcagctgccatgttggagaggcccacatggcgaggacataaaggcggcctctggccaacaggcagtgagaactgaggttctcagtccagcaggccatgaggaactggatcctgccaacaccacgtgagattggaaagggacccttccccggctgagctctcaggtgggaggcagctggtatttgactgaaccctggcgagaagtggagctggttaagctgggtccaaattcctgacccacagaacgtgtgacgatacatatggctctacacgtaactacatataactctatgactagacatgtgtgctgccaagccacagtgctggggtgatttgttccagcagcagatgactgtatttgtttacttgggctgccataacaaagtaccacagaccgggcagcttaaacaacagaaatgtatcttctcatggtcctagaggctagaagtccgagatgaaggtgttggcaaggttggtttcccctgagccctgtccttgacttgcagacagctgcctttcttggtgtcctcacgtggccgtccctctgagcatgtccgtgtcctaatctcttcttgtaagacatcagtcggattatggcccaccctaatgatctcattttagcctccttacctccttaaagaacctgtctccaaatacaatcccattctgaggttctggggcttaggacatcaacctgaatgagggacacagttcgtcccataacaataagtaatagagttgcaccctagcagccgctctgaccttctttagagacctttttatctaagcagtttgcctcttagctagtgtatgacagtccctgtccttccttcagctagctatggccatataactaagtaagtgctagccagggagatgcaagcagaagtaatgagtagtacttctagaaaggaatcacataaaatgaagggaaagacacacctttttcctgctccctggaatgggatgtgttggctgggacttgagcagccattttggatcatctgcataaaagccacatcctggggtgatgggagctggaaggagggggcccagatgactgtgtgcagttgtcattccagcctggcctggaattctttcatctgtaagggagaaatacacttccgtctgagctgctgtgactccaggtcattctgttatatgctcccaaaccaaattattccaacccatccagggaggcaatggatcatcgggactttacatggccacaacaaatcacaactgcttcagccatggctgagaaaacatcatctgcctagaattgactatcatcctgacaggaaatctaatgtgaaagacttacagaaatggactgtcaagacacaggtttttaaagttcacagaaaagtttggcatcatctaaaaagagtaaagatcaatactgggcagtctggcatggtgtctctgaggcctaaaaatgggcacagtccctgaacagcaaaaacatttcccgtaatttatcctatgcaaacagtcaggcatgtgtgatcaatgatttattatagcaacacttaggacaaaagatggaaaaaagatagatgctgggcagaaggagctgagttaaaggaatcccaacatagccacaggcagtcattagaatcctgttccagatgagcacttgtgacacagggaaaggcttacaacatgctagccgactacacaccatgtagagcctgataacgtcccccattctaaagaaaaaacagcgtacacatacacagaagagagatgaaggcgcagtggctcacacctgtaatcccagcactttgggaggccgaggtgggctgatcacctgaggtcaggagttcaagtccgcctgaccaacaagatgaaaccctctctcaactaaaaatacaaaaattagccgggcatggtggcaggtgcctgtaatcccagctactcaagaggctgaggcaggagaatcgcttgaacccaggaggcggaggttgcagtgagctgagatcgagccactgcactccagcctgggtgacagagcaagactctgtctcaaaaaaaaaaaaaagagcgagagagaaataaggttcctagtcaccaagtcatagcagtgactctctctgggcaggggaattgagggcggtttatatcttaatctttgtgcttttccatatttttcaaattttcagcaatgaacatgaactattcaggggaagattgttaaatgaaagaatctcactgggcggggagctaagcatgacacctggccacctgcctgtgcctgtcctgccgagaagagagaagaggccttgaaagcagccagagggggtgcacaccagcctgggcagggggcagtaagcgggagcagccccgacccgagaccaggtgggatgcacgcggggtggggctggaaaagaaggaaaccctgacgcagaccccagggggaaatgaggagcagtcgagcaactggagagcagaggaggctctttggtggcctccagccccacccctgagagggctgagagaggagcaggtgtgagggcaaaacaggcaggaaccttccagagaagaaagccaggagctggtaaagagcacgggcccagctgcagacagaaacctttcccgtctcataggatggctgaggcgcaggacagcggcgggggcgcgtcctccttcatctgt

SEQ ID NO: 13 - protein, 13 aa, Human immunodeficiency virus
GRKKRRQRRRPPQ

SEQ ID NO: 14 - protein, 16 aa, Drosophila sp.
RQIKIWFQNRRMKWKK

SEQ ID NO: 15 - RNA, 21 nt, synthetic construct
  source 1..21: mol_type = other RNA
ggcggtaaccctgcagcctga

SEQ ID NO: 16 - RNA, 21 nt, synthetic construct
  source 1..21: mol_type = other RNA
gcagagacagagtgacccaga

SEQ ID NO: 17 - RNA, 21 nt, synthetic construct
  source 1..21: mol_type = other RNA
agacagagtgacccagcaaca

SEQ ID NO: 18 - RNA, 21 nt, synthetic construct
  source 1..21: mol_type = other RNA
cagagtgacccagcaacccaa

SEQ ID NO: 19 - RNA, 21 nt, synthetic construct
  source 1..21: mol_type = other RNA
agagtgacccagcaacccaga

SEQ ID NO: 20 - RNA, 21 nt, synthetic construct
  source 1..21: mol_type = other RNA
agcaacccagagcccatgaga

SEQ ID NO: 21 - RNA, 21 nt, synthetic construct
  source 1..21: mol_type = other RNA
gcaacccagagcccatgagga

SEQ ID NO: 22 - RNA, 21 nt, synthetic construct
  source 1..21: mol_type = other RNA
caacccagagcccatgaggga

SEQ ID NO: 23 - RNA, 21 nt, synthetic construct
  source 1..21: mol_type = other RNA
acccagagcccatgagggaca

SEQ ID NO: 24 - RNA, 21 nt, synthetic construct
  source 1..21: mol_type = other RNA
cgctccctcacttgggtctta

SEQ ID NO: 25 - RNA, 21 nt, synthetic construct
  source 1..21: mol_type = other RNA
ctccctcacttgggtcttcca

SEQ ID NO: 26 - RNA, 21 nt, synthetic construct
  source 1..21: mol_type = other RNA
ccctcacttgggtcttcccta

SEQ ID NO: 27 - RNA, 21 nt, synthetic construct
  source 1..21: mol_type = other RNA
cctcacttgggtcttccctta

SEQ ID NO: 28 - RNA, 21 nt, synthetic construct
  source 1..21: mol_type = other RNA
cacttgggtcttcccttgtca

SEQ ID NO: 29 - RNA, 21 nt, synthetic construct
  source 1..21: mol_type = other RNA
acttgggtcttcccttgtcca

SEQ ID NO: 30 - RNA, 21 nt, synthetic construct
  source 1..21: mol_type = other RNA
cttgggtcttcccttgtccta

SEQ ID NO: 31 - RNA, 21 nt, synthetic construct
  source 1..21: mol_type = other RNA
tgggtcttcccttgtcctcta

SEQ ID NO: 32 - RNA, 21 nt, synthetic construct
  source 1..21: mol_type = other RNA
gtcttcccttgtcctctcgca

SEQ ID NO: 33 - RNA, 21 nt, synthetic construct
  source 1..21: mol_type = other RNA
tcttcccttgtcctctcgcga

SEQ ID NO: 34 - RNA, 21 nt, synthetic construct
  source 1..21: mol_type = other RNA
cttcccttgtcctctcgcgaa

SEQ ID NO: 35 - RNA, 21 nt, synthetic construct
  source 1..21: mol_type = other RNA
ttcccttgtcctctcgcgaga

SEQ ID NO: 36 - RNA, 21 nt, synthetic construct
  source 1..21: mol_type = other RNA
tcccttgtcctctcgcgagga

SEQ ID NO: 37 - RNA, 21 nt, synthetic construct
  source 1..21: mol_type = other RNA
cccttgtcctctcgcgaggga

SEQ ID NO: 38 - RNA, 21 nt, synthetic construct
  source 1..21: mol_type = other RNA
cctgtcctgaattcaccgaga

SEQ ID NO: 39 - RNA, 21 nt, synthetic construct
  source 1..21: mol_type = other RNA
ctgtcctgaattcaccgagga

SEQ ID NO: 40 - RNA, 21 nt, synthetic construct
  source 1..21: mol_type = other RNA
tgtcctgaattcaccgaggga

SEQ ID NO: 41 - RNA, 21 nt, synthetic construct
  source 1..21: mol_type = other RNA
tcgcccttcgcaggatgcgaa

SEQ ID NO: 42 - RNA, 21 nt, synthetic construct
  source 1..21: mol_type = other RNA
cgcccttcgcaggatgcgaaa

SEQ ID NO: 43 - RNA, 21 nt, synthetic construct
  source 1..21: mol_type = other RNA
gcccttcgcaggatgcgaaga

SEQ ID NO: 44 - RNA, 21 nt, synthetic construct
  source 1..21: mol_type = other RNA
ccttcgcaggatgcgaagaga

SEQ ID NO: 45 - RNA, 21 nt, synthetic construct
  source 1..21: mol_type = other RNA
cttcgcaggatgcgaagagta

SEQ ID NO: 46 - RNA, 21 nt, synthetic construct
  source 1..21: mol_type = other RNA
ttcgcaggatgcgaagagtta

SEQ ID NO: 47 - RNA, 21 nt, synthetic construct
  source 1..21: mol_type = other RNA
tcgcaggatgcgaagagttga

SEQ ID NO: 48 - RNA, 21 nt, synthetic construct
  source 1..21: mol_type = other RNA
cgcaggatgcgaagagttgga

SEQ ID NO: 49 - RNA, 21 nt, synthetic construct
  source 1..21: mol_type = other RNA
gcaggatgcgaagagttggga

SEQ ID NO: 50 - RNA, 21 nt, synthetic construct
  source 1..21: mol_type = other RNA
atttgcgagaaaccagggcga

SEQ ID NO: 51 - RNA, 21 nt, synthetic construct
  source 1..21: mol_type = other RNA
tttgcgagaaaccagggcgga

SEQ ID NO: 52 - RNA, 21 nt, synthetic construct
  source 1..21: mol_type = other RNA
ttgcgagaaaccagggcggga

SEQ ID NO: 53 - RNA, 21 nt, synthetic construct
  source 1..21: mol_type = other RNA
taactgcgttgtgaagagaaa

SEQ ID NO: 54 - RNA, 21 nt, synthetic construct
  source 1..21: mol_type = other RNA
actgcgttgtgaagagaacta

SEQ ID NO: 55 - RNA, 21 nt, synthetic construct
  source 1..21: mol_type = other RNA
tgcgttgtgaagagaacttga

SEQ ID NO: 56 - RNA, 21 nt, synthetic construct
  source 1..21: mol_type = other RNA
gcgttgtgaagagaacttgga

SEQ ID NO: 57 - RNA, 21 nt, synthetic construct
  source 1..21: mol_type = other RNA
gttgtgaagagaacttggaga

SEQ ID NO: 58 - RNA, 21 nt, synthetic construct
  source 1..21: mol_type = other RNA
gtgaagagaacttggaggaga

SEQ ID NO: 59 - RNA, 21 nt, synthetic construct
  source 1..21: mol_type = other RNA
tgaagagaacttggaggagca

SEQ ID NO: 60 - RNA, 21 nt, synthetic construct
  source 1..21: mol_type = other RNA
agagaacttggaggagccgaa

SEQ ID NO: 61 - RNA, 21 nt, synthetic construct
  source 1..21: mol_type = other RNA
gagaacttggaggagccgaga

SEQ ID NO: 62 - RNA, 21 nt, synthetic construct
  source 1..21: mol_type = other RNA
cttggaggagccgagatttga

SEQ ID NO: 63 - RNA, 21 nt, synthetic construct
  source 1..21: mol_type = other RNA
ttggaggagccgagatttgca

SEQ ID NO: 64 - RNA, 21 nt, synthetic construct
  source 1..21: mol_type = other RNA
tggaggagccgagatttgcta

SEQ ID NO: 65 - RNA, 21 nt, synthetic construct
  source 1..21: mol_type = other RNA
ggaggagccgagatttgctca

SEQ ID NO: 66 - RNA, 21 nt, synthetic construct
  source 1..21: mol_type = other RNA
gaggagccgagatttgctcaa

SEQ ID NO: 67 - RNA, 21 nt, synthetic construct
  source 1..21: mol_type = other RNA
gagccgagatttgctcagtga

SEQ ID NO: 68 - RNA, 21 nt, synthetic construct
  source 1..21: mol_type = other RNA
gccgagatttgctcagtgcca

SEQ ID NO: 69 - RNA, 21 nt, synthetic construct
  source 1..21: mol_type = other RNA
cgagatttgctcagtgccaca

SEQ ID NO: 70 - RNA, 21 nt, synthetic construct
  source 1..21: mol_type = other RNA
atttgctcagtgccacttcca

SEQ ID NO: 71 - RNA, 21 nt, synthetic construct
  source 1..21: mol_type = other RNA
ttgctcagtgccacttcccta

SEQ ID NO: 72 - RNA, 21 nt, synthetic construct
  source 1..21: mol_type = other RNA
tgctcagtgccacttccctca

SEQ ID NO: 73 - RNA, 21 nt, synthetic construct
  source 1..21: mol_type = other RNA
agtgccacttccctcttctaa

SEQ ID NO: 74 - RNA, 21 nt, synthetic construct
  source 1..21: mol_type = other RNA
gccacttccctcttctagtca

SEQ ID NO: 75 - RNA, 21 nt, synthetic construct
  source 1..21: mol_type = other RNA
ccacttccctcttctagtcta

SEQ ID NO: 76 - RNA, 21 nt, synthetic construct
  source 1..21: mol_type = other RNA
cacttccctcttctagtctga

SEQ ID NO: 77 - RNA, 21 nt, synthetic construct
  source 1..21: mol_type = other RNA
acttccctcttctagtctgaa

SEQ ID NO: 78 - RNA, 21 nt, synthetic construct
  source 1..21: mol_type = other RNA
cttccctcttctagtctgaga

SEQ ID NO: 79 - RNA, 21 nt, synthetic construct
  source 1..21: mol_type = other RNA
tccctcttctagtctgagaga

SEQ ID NO: 80 - RNA, 21 nt, synthetic construct
  source 1..21: mol_type = other RNA
cctcttctagtctgagaggga

SEQ ID NO: 81 - RNA, 21 nt, synthetic construct
  source 1..21: mol_type = other RNA
tcttctagtctgagagggaaa

SEQ ID NO: 82 - RNA, 21 nt, synthetic construct
  source 1..21: mol_type = other RNA
cttctagtctgagagggaaga

SEQ ID NO: 83 - RNA, 21 nt, synthetic construct
  source 1..21: mol_type = other RNA
tctagtctgagagggaagaga

SEQ ID NO: 84 - RNA, 21 nt, synthetic construct
  source 1..21: mol_type = other RNA
ctagtctgagagggaagagga

SEQ ID NO: 85 - RNA, 21 nt, synthetic construct
  source 1..21: mol_type = other RNA
tagtctgagagggaagaggga

SEQ ID NO: 86 - RNA, 21 nt, synthetic construct
  source 1..21: mol_type = other RNA
gtctgagagggaagagggcta

SEQ ID NO: 87 - RNA, 21 nt, synthetic construct
  source 1..21: mol_type = other RNA
tctgagagggaagagggctga

SEQ ID NO: 88 - RNA, 21 nt, synthetic construct
  source 1..21: mol_type = other RNA
ctgagagggaagagggctgga

SEQ ID NO: 89 - RNA, 21 nt, synthetic construct
  source 1..21: mol_type = other RNA
tttggagctggagagatgtga

SEQ ID NO: 90 - RNA, 21 nt, synthetic construct
  source 1..21: mol_type = other RNA
ttggagctggagagatgtgga

SEQ ID NO: 91 - RNA, 21 nt, synthetic construct
  source 1..21: mol_type = other RNA
gcagtggatgacataatgcta

SEQ ID NO: 92 - RNA, 21 nt, synthetic construct
  source 1..21: mol_type = other RNA
cagtggatgacataatgctta

SEQ ID NO: 93 - RNA, 21 nt, synthetic construct
  source 1..21: mol_type = other RNA
taggacgcctcggcgggagta

SEQ ID NO: 94 - RNA, 21 nt, synthetic construct
  source 1..21: mol_type = other RNA
tgagggcgcgtccaatgggaa

SEQ ID NO: 95 - RNA, 21 nt, synthetic construct
  source 1..21: mol_type = other RNA
gcgtccaatgggagatttcta

SEQ ID NO: 96 - RNA, 21 nt, synthetic construct
  source 1..21: mol_type = other RNA
cgtccaatgggagatttctta

SEQ ID NO: 97 - RNA, 21 nt, synthetic construct
  source 1..21: mol_type = other RNA
cagcctgagatttgaggctca

SEQ ID NO: 98 - RNA, 21 nt, synthetic construct
  source 1..21: mol_type = other RNA
ctgagatttgaggctcttcca

SEQ ID NO: 99 - RNA, 21 nt, synthetic construct
  source 1..21: mol_type = other RNA
tgagatttgaggctcttccta

SEQ ID NO: 100 - RNA, 21 nt, synthetic construct
  source 1..21: mol_type = other RNA
gagatttgaggctcttcctaa

SEQ ID NO: 101 - RNA, 21 nt, synthetic construct
  source 1..21: mol_type = other RNA
agatttgaggctcttcctaca

SEQ ID NO: 102 - RNA, 21 nt, synthetic construct
  source 1..21: mol_type = other RNA
tttgaggctcttcctacatta

SEQ ID NO: 103 - RNA, 21 nt, synthetic construct
  source 1..21: mol_type = other RNA
tgaggctcttcctacattgta

SEQ ID NO: 104 - RNA, 21 nt, synthetic construct
  source 1..21: mol_type = other RNA
gaggctcttcctacattgtca

SEQ ID NO: 105 - RNA, 21 nt, synthetic construct
  source 1..21: mol_type = other RNA
aggctcttcctacattgtcaa

SEQ ID NO: 106 - RNA, 21 nt, synthetic construct
  source 1..21: mol_type = other RNA
ggctcttcctacattgtcaga

SEQ ID NO: 107 - RNA, 21 nt, synthetic construct
  source 1..21: mol_type = other RNA
gctcttcctacattgtcagga

SEQ ID NO: 108 - RNA, 21 nt, synthetic construct
  source 1..21: mol_type = other RNA
ctcttcctacattgtcaggaa

SEQ ID NO: 109 - RNA, 21 nt, synthetic construct
  source 1..21: mol_type = other RNA
cttcctacattgtcaggacaa

SEQ ID NO: 110 - RNA, 21 nt, synthetic construct
  source 1..21: mol_type = other RNA
tacattgtcaggacatttcaa

SEQ ID NO: 111 - RNA, 21 nt, synthetic construct
  source 1..21: mol_type = other RNA
acattgtcaggacatttcata

SEQ ID NO: 112 - RNA, 21 nt, synthetic construct
  source 1..21: mol_type = other RNA
cattgtcaggacatttcatta

SEQ ID NO: 113 - RNA, 21 nt, synthetic construct
  source 1..21: mol_type = other RNA
ttgtcaggacatttcatttaa

SEQ ID NO: 114 - RNA, 21 nt, synthetic construct
  source 1..21: mol_type = other RNA
tcaggacatttcatttagtta

SEQ ID NO: 115 - RNA, 21 nt, synthetic construct
  source 1..21: mol_type = other RNA
caggacatttcatttagttca

SEQ ID NO: 116 - RNA, 21 nt, synthetic construct
  source 1..21: mol_type = other RNA
aggacatttcatttagttcaa

SEQ ID NO: 117 - RNA, 21 nt, synthetic construct
  source 1..21: mol_type = other RNA
ggacatttcatttagttcata

SEQ ID NO: 118 - RNA, 21 nt, synthetic construct
  source 1..21: mol_type = other RNA
acatttcatttagttcatgaa

SEQ ID NO: 119 - RNA, 21 nt, synthetic construct
  source 1..21: mol_type = other RNA
tttcatttagttcatgatcaa

SEQ ID NO: 120 - RNA, 21 nt, synthetic construct
  source 1..21: mol_type = other RNA
tcatttagttcatgatcacga

SEQ ID NO: 121 - RNA, 21 nt, synthetic construct
  source 1..21: mol_type = other RNA
catttagttcatgatcacgga

SEQ ID NO: 122 - RNA, 21 nt, synthetic construct
  source 1..21: mol_type = other RNA
atttagttcatgatcacggta

SEQ ID NO: 123 - RNA, 21 nt, synthetic construct
  source 1..21: mol_type = other RNA
tttagttcatgatcacggtga

SEQ ID NO: 124 - RNA, 21 nt, synthetic construct
  source 1..21: mol_type = other RNA
ttagttcatgatcacggtgga

SEQ ID NO: 125 - RNA, 21 nt, synthetic construct
  source 1..21: mol_type = other RNA
tagttcatgatcacggtggta

SEQ ID NO: 126 - RNA, 21 nt, synthetic construct
  source 1..21: mol_type = other RNA
agttcatgatcacggtggtaa

SEQ ID NO: 127 - RNA, 21 nt, synthetic construct
  source 1..21: mol_type = other RNA
gttcatgatcacggtggtaga

SEQ ID NO: 128 - RNA, 21 nt, synthetic construct
  source 1..21: mol_type = other RNA
catgatcacggtggtagtaaa

SEQ ID NO: 129 - RNA, 21 nt, synthetic construct
  source 1..21: mol_type = other RNA
atgatcacggtggtagtaaca

SEQ ID NO: 130 - RNA, 21 nt, synthetic construct
  source 1..21: mol_type = other RNA
gatcacggtggtagtaacaca

SEQ ID NO: 131 - RNA, 21 nt, synthetic construct
  source 1..21: mol_type = other RNA
atcacggtggtagtaacacga

SEQ ID NO: 132 - RNA, 21 nt, synthetic construct
  source 1..21: mol_type = other RNA
tcacggtggtagtaacacgaa

SEQ ID NO: 133 - RNA, 21 nt, synthetic construct
  source 1..21: mol_type = other RNA
cacggtggtagtaacacgata

SEQ ID NO: 134 - RNA, 21 nt, synthetic construct
  source 1..21: mol_type = other RNA
acggtggtagtaacacgatta

SEQ ID NO: 135 - RNA, 21 nt, synthetic construct
  source 1..21: mol_type = other RNA
gcaccacctaagagatctgca

SEQ ID NO: 136 - RNA, 21 nt, synthetic construct
  source 1..21: mol_type = other RNA
caccacctaagagatctgcta

SEQ ID NO: 137 - RNA, 21 nt, synthetic construct
  source 1..21: mol_type = other RNA
ccacctaagagatctgctcaa

SEQ ID NO: 138 - RNA, 21 nt, synthetic construct
  source 1..21: mol_type = other RNA
cctaagagatctgctcatcta

SEQ ID NO: 139 - RNA, 21 nt, synthetic construct
  source 1..21: mol_type = other RNA
taagagatctgctcatctaaa

SEQ ID NO: 140 - RNA, 21 nt, synthetic construct
  source 1..21: mol_type = other RNA
aagagatctgctcatctaaga

SEQ ID NO: 141 - RNA, 21 nt, synthetic construct
  source 1..21: mol_type = other RNA
agagatctgctcatctaagca

SEQ ID NO: 142 - RNA, 21 nt, synthetic construct
  source 1..21: mol_type = other RNA
gagatctgctcatctaagcca

SEQ ID NO: 143 - RNA, 21 nt, synthetic construct
  source 1..21: mol_type = other RNA
agatctgctcatctaagccta

SEQ ID NO: 144 - RNA, 21 nt, synthetic construct
  source 1..21: mol_type = other RNA
gatctgctcatctaagcctaa

SEQ ID NO: 145 - RNA, 21 nt, synthetic construct
  source 1..21: mol_type = other RNA
ctgctcatctaagcctaagta

SEQ ID NO: 146 - RNA, 21 nt, synthetic construct
  source 1..21: mol_type = other RNA
tgctcatctaagcctaagtta

SEQ ID NO: 147 - RNA, 21 nt, synthetic construct
  source 1..21: mol_type = other RNA
gctcatctaagcctaagttga

SEQ ID NO: 148 - RNA, 21 nt, synthetic construct
  source 1..21: mol_type = other RNA
ctcatctaagcctaagttgga

SEQ ID NO: 149 - RNA, 21 nt, synthetic construct
  source 1..21: mol_type = other RNA
tcatctaagcctaagttggta

SEQ ID NO: 150 - RNA, 21 nt, synthetic construct
  source 1..21: mol_type = other RNA
catctaagcctaagttggtca

SEQ ID NO: 151 - RNA, 21 nt, synthetic construct
  source 1..21: mol_type = other RNA
atctaagcctaagttggtcta

SEQ ID NO: 152 - RNA, 21 nt, synthetic construct
  source 1..21: mol_type = other RNA
tctaagcctaagttggtctga

SEQ ID NO: 153 - RNA, 21 nt, synthetic construct
  source 1..21: mol_type = other RNA
ctaagcctaagttggtctgca

SEQ ID NO: 154 - RNA, 21 nt, synthetic construct
  source 1..21: mol_type = other RNA
taagcctaagttggtctgcaa

SEQ ID NO: 155 - RNA, 21 nt, synthetic construct
  source 1..21: mol_type = other RNA
agcctaagttggtctgcagga

SEQ ID NO: 156 - RNA, 21 nt, synthetic construct
  source 1..21: mol_type = other RNA
cctaagttggtctgcaggcga

SEQ ID NO: 157 - RNA, 21 nt, synthetic construct
  source 1..21: mol_type = other RNA
ctaagttggtctgcaggcgta

SEQ ID NO: 158 - RNA, 21 nt, synthetic construct
  source 1..21: mol_type = other RNA
taagttggtctgcaggcgtta

SEQ ID NO: 159 - RNA, 21 nt, synthetic construct
  source 1..21: mol_type = other RNA
agttggtctgcaggcgtttga

SEQ ID NO: 160 - RNA, 21 nt, synthetic construct
  source 1..21: mol_type = other RNA
tggtctgcaggcgtttgaata

SEQ ID NO: 161 - RNA, 21 nt, synthetic construct
  source 1..21: mol_type = other RNA
ggtctgcaggcgtttgaatga

SEQ ID NO: 162 - RNA, 21 nt, synthetic construct
  source 1..21: mol_type = other RNA
tctgcaggcgtttgaatgaga

SEQ ID NO: 163 - RNA, 21 nt, synthetic construct
  source 1..21: mol_type = other RNA
ctgcaggcgtttgaatgagta

SEQ ID NO: 164 - RNA, 21 nt, synthetic construct
  source 1..21: mol_type = other RNA
tgcaggcgtttgaatgagtta

SEQ ID NO: 165 - RNA, 21 nt, synthetic construct
  source 1..21: mol_type = other RNA
gcaggcgtttgaatgagttga

SEQ ID NO: 166 - RNA, 21 nt, synthetic construct
  source 1..21: mol_type = other RNA
caggcgtttgaatgagttgta

SEQ ID NO: 167 - RNA, 21 nt, synthetic construct
  source 1..21: mol_type = other RNA
aggcgtttgaatgagttgtga

SEQ ID NO: 168 - RNA, 21 nt, synthetic construct
  source 1..21: mol_type = other RNA
gcgtttgaatgagttgtggta

SEQ ID NO: 169 - RNA, 21 nt, synthetic construct
  source 1..21: mol_type = other RNA
gtttgaatgagttgtggttga

SEQ ID NO: 170 - RNA, 21 nt, synthetic construct
  source 1..21: mol_type = other RNA
tttgaatgagttgtggttgca

SEQ ID NO: 171 - RNA, 21 nt, synthetic construct
  source 1..21: mol_type = other RNA
ttgaatgagttgtggttgcca

SEQ ID NO: 172 - RNA, 21 nt, synthetic construct
  source 1..21: mol_type = other RNA
tgaatgagttgtggttgccaa

SEQ ID NO: 173 - RNA, 21 nt, synthetic construct
  source 1..21: mol_type = other RNA
gagttgtggttgccaagtaaa

SEQ ID NO: 174 - RNA, 21 nt, synthetic construct
  source 1..21: mol_type = other RNA
agttgtggttgccaagtaaaa

SEQ ID NO: 175 - RNA, 21 nt, synthetic construct
  source 1..21: mol_type = other RNA
gttgtggttgccaagtaaaga

SEQ ID NO: 176 - RNA, 21 nt, synthetic construct
  source 1..21: mol_type = other RNA
ttgtggttgccaagtaaagta

SEQ ID NO: 177 - RNA, 21 nt, synthetic construct
  source 1..21: mol_type = other RNA
tggttgccaagtaaagtggta

SEQ ID NO: 178 - RNA, 21 nt, synthetic construct
  source 1..21: mol_type = other RNA
ggttgccaagtaaagtggtga

SEQ ID NO: 179 - RNA, 21 nt, synthetic construct
  source 1..21: mol_type = other RNA
gccaagtaaagtggtgaacta

SEQ ID NO: 180 - RNA, 21 nt, synthetic construct
  source 1..21: mol_type = other RNA
caagtaaagtggtgaacttaa

SEQ ID NO: 181 - RNA, 21 nt, synthetic construct
  source 1..21: mol_type = other RNA
aagtaaagtggtgaacttaca

SEQ ID NO: 182 - RNA, 21 nt, synthetic construct
  source 1..21: mol_type = other RNA
agtaaagtggtgaacttacga

SEQ ID NO: 183 - RNA, 21 nt, synthetic construct
  source 1..21: mol_type = other RNA
gtaaagtggtgaacttacgta

SEQ ID NO: 184 - RNA, 21 nt, synthetic construct
  source 1..21: mol_type = other RNA
taaagtggtgaacttacgtga

SEQ ID NO: 185 - RNA, 21 nt, synthetic construct
  source 1..21: mol_type = other RNA
aaagtggtgaacttacgtgga

SEQ ID NO: 186 - RNA, 21 nt, synthetic construct
  source 1..21: mol_type = other RNA
aagtggtgaacttacgtggta

SEQ ID NO: 187 - RNA, 21 nt, synthetic construct
  source 1..21: mol_type = other RNA
agtggtgaacttacgtggtga

SEQ ID NO: 188 - RNA, 21 nt, synthetic construct
  source 1..21: mol_type = other RNA
gtggtgaacttacgtggtgaa

SEQ ID NO: 189 - RNA, 21 nt, synthetic construct
  source 1..21: mol_type = other RNA
gtgaacttacgtggtgattaa

SEQ ID NO: 190 - RNA, 21 nt, synthetic construct
  source 1..21: mol_type = other RNA
gaacttacgtggtgattaata

SEQ ID NO: 191 - RNA, 21 nt, synthetic construct
  source 1..21: mol_type = other RNA
aacttacgtggtgattaatga

SEQ ID NO: 192 - RNA, 21 nt, synthetic construct
  source 1..21: mol_type = other RNA
acttacgtggtgattaatgaa

SEQ ID NO: 193 - RNA, 21 nt, synthetic construct
  source 1..21: mol_type = other RNA
cttacgtggtgattaatgaaa

SEQ ID NO: 194 - RNA, 21 nt, synthetic construct
  source 1..21: mol_type = other RNA
ttacgtggtgattaatgaaaa

SEQ ID NO: 195 - RNA, 21 nt, synthetic construct
  source 1..21: mol_type = other RNA
tacgtggtgattaatgaaata

SEQ ID NO: 196 - RNA, 21 nt, synthetic construct
  source 1..21: mol_type = other RNA
tggtgattaatgaaattatca

SEQ ID NO: 197 - RNA, 21 nt, synthetic construct
  source 1..21: mol_type = other RNA
agtttgggcccgctgcagcta

SEQ ID NO: 198 - RNA, 21 nt, synthetic construct
  source 1..21: mol_type = other RNA
tggcggtaaccctgcagccta

SEQ ID NO: 199 - RNA, 21 nt, synthetic construct
  source 1..21: mol_type = other RNA
cagagacagagtgacccagca

SEQ ID NO: 200 - RNA, 21 nt, synthetic construct
  source 1..21: mol_type = other RNA
agagacagagtgacccagcaa

SEQ ID NO: 201 - RNA, 21 nt, synthetic construct
  source 1..21: mol_type = other RNA
gagacagagtgacccagcaaa

SEQ ID NO: 202 - RNA, 21 nt, synthetic construct
  source 1..21: mol_type = other RNA
gacagagtgacccagcaacca

SEQ ID NO: 203 - RNA, 21 nt, synthetic construct
  source 1..21: mol_type = other RNA
acagagtgacccagcaaccca

SEQ ID NO: 204 - RNA, 21 nt, synthetic construct
  source 1..21: mol_type = other RNA
gagtgacccagcaacccagaa

SEQ ID NO: 205 - RNA, 21 nt, synthetic construct
  source 1..21: mol_type = other RNA
agtgacccagcaacccagaga

SEQ ID NO: 206 - RNA, 21 nt, synthetic construct
  source 1..21: mol_type = other RNA
aacccagagcccatgagggaa

SEQ ID NO: 207 - RNA, 21 nt, synthetic construct
  source 1..21: mol_type = other RNA
cccagagcccatgagggacaa

SEQ ID NO: 208 - RNA, 21 nt, synthetic construct
  source 1..21: mol_type = other RNA
ccagagcccatgagggacaca

SEQ ID NO: 209 - RNA, 21 nt, synthetic construct
  source 1..21: mol_type = other RNA
gctccctcacttgggtcttca

SEQ ID NO: 210 - RNA, 21 nt, synthetic construct
  source 1..21: mol_type = other RNA
tccctcacttgggtcttccca

SEQ ID NO: 211 - RNA, 21 nt, synthetic construct
  source 1..21: mol_type = other RNA
tcacttgggtcttcccttgta

SEQ ID NO: 212 - RNA, 21 nt, synthetic construct
  source 1..21: mol_type = other RNA
ttgggtcttcccttgtcctca

SEQ ID NO: 213 - RNA, 21 nt, synthetic construct
  source 1..21: mol_type = other RNA
gggtcttcccttgtcctctca

SEQ ID NO: 214 - RNA, 21 nt, synthetic construct
  source 1..21: mol_type = other RNA
ggtcttcccttgtcctctcga

SEQ ID NO: 215 - RNA, 21 nt, synthetic construct
  source 1..21: mol_type = other RNA
gcctgtcctgaattcaccgaa

SEQ ID NO: 216 - RNA, 21 nt, synthetic construct
  source 1..21: mol_type = other RNA
cccttcgcaggatgcgaagaa

SEQ ID NO: 217 - RNA, 21 nt, synthetic construct
  source 1..21: mol_type = other RNA
tatttgcgagaaaccagggca

SEQ ID NO: 218 - RNA, 21 nt, synthetic construct
  source 1..21: mol_type = other RNA
aactgcgttgtgaagagaaca

SEQ ID NO: 219 - RNA, 21 nt, synthetic construct
  source 1..21: mol_type = other RNA
ctgcgttgtgaagagaactta

SEQ ID NO: 220 - RNA, 21 nt, synthetic construct
  source 1..21: mol_type = other RNA
cgttgtgaagagaacttggaa

SEQ ID NO: 221 - RNA, 21 nt, synthetic construct
  source 1..21: mol_type = other RNA
gaagagaacttggaggagcca

SEQ ID NO: 222 - RNA, 21 nt, synthetic construct
  source 1..21: mol_type = other RNA
aagagaacttggaggagccga

SEQ ID NO: 223 - RNA, 21 nt, synthetic construct
  source 1..21: mol_type = other RNA
agaacttggaggagccgagaa

SEQ ID NO: 224 - RNA, 21 nt, synthetic construct
  source 1..21: mol_type = other RNA
gaacttggaggagccgagata

SEQ ID NO: 225 - RNA, 21 nt, synthetic construct
  source 1..21: mol_type = other RNA
aacttggaggagccgagatta

SEQ ID NO: 226 - RNA, 21 nt, synthetic construct
  source 1..21: mol_type = other RNA
aggagccgagatttgctcaga

SEQ ID NO: 227 - RNA, 21 nt, synthetic construct
  source 1..21: mol_type = other RNA
ggagccgagatttgctcagta

SEQ ID NO: 228 - RNA, 21 nt, synthetic construct
  source 1..21: mol_type = other RNA
agccgagatttgctcagtgca

SEQ ID NO: 229 - RNA, 21 nt, synthetic construct
  source 1..21: mol_type = other RNA
ccgagatttgctcagtgccaa

SEQ ID NO: 230 - RNA, 21 nt, synthetic construct
  source 1..21: mol_type = other RNA
gagatttgctcagtgccacta

SEQ ID NO: 231 - RNA, 21 nt, synthetic construct
  source 1..21: mol_type = other RNA
agatttgctcagtgccactta

SEQ ID NO: 232 - RNA, 21 nt, synthetic construct
  source 1..21: mol_type = other RNA
gatttgctcagtgccacttca

SEQ ID NO: 233 - RNA, 21 nt, synthetic construct
  source 1..21: mol_type = other RNA
tttgctcagtgccacttccca

SEQ ID NO: 234 - RNA, 21 nt, synthetic construct
  source 1..21: mol_type = other RNA
gctcagtgccacttccctcta

SEQ ID NO: 235 - RNA, 21 nt, synthetic construct
  source 1..21: mol_type = other RNA
ctcagtgccacttccctctta

SEQ ID NO: 236 - RNA, 21 nt, synthetic construct
  source 1..21: mol_type = other RNA
ttccctcttctagtctgagaa

SEQ ID NO: 237 - RNA, 21 nt, synthetic construct
  source 1..21: mol_type = other RNA
ccctcttctagtctgagagga

SEQ ID NO: 238 - RNA, 21 nt, synthetic construct
  source 1..21: mol_type = other RNA
ctcttctagtctgagagggaa

SEQ ID NO: 239 - RNA, 21 nt, synthetic construct
  source 1..21: mol_type = other RNA
ttctagtctgagagggaagaa

SEQ ID NO: 240 - RNA, 21 nt, synthetic construct
  source 1..21: mol_type = other RNA
agtctgagagggaagagggca

SEQ ID NO: 241 - RNA, 21 nt, synthetic construct
  source 1..21: mol_type = other RNA
agggcgcgtccaatgggagaa

SEQ ID NO: 242 - RNA, 21 nt, synthetic construct
  source 1..21: mol_type = other RNA
gggcgcgtccaatgggagata

SEQ ID NO: 243 - RNA, 21 nt, synthetic construct
  source 1..21: mol_type = other RNA
ggcgcgtccaatgggagatta

SEQ ID NO: 244 - RNA, 21 nt, synthetic construct
  source 1..21: mol_type = other RNA
cgcgtccaatgggagatttca

SEQ ID NO: 245 - RNA, 21 nt, synthetic construct
  source 1..21: mol_type = other RNA
acagcctgagatttgaggcta

SEQ ID NO: 246 - RNA, 21 nt, synthetic construct
  source 1..21: mol_type = other RNA
agcctgagatttgaggctcta

SEQ ID NO: 247 - RNA, 21 nt, synthetic construct
  source 1..21: mol_type = other RNA
gcctgagatttgaggctctta

SEQ ID NO: 248 - RNA, 21 nt, synthetic construct
  source 1..21: mol_type = other RNA
cctgagatttgaggctcttca

SEQ ID NO: 249 - RNA, 21 nt, synthetic construct
  source 1..21: mol_type = other RNA
gatttgaggctcttcctacaa

SEQ ID NO: 250 - RNA, 21 nt, synthetic construct
  source 1..21: mol_type = other RNA
atttgaggctcttcctacata

SEQ ID NO: 251 - RNA, 21 nt, synthetic construct
  source 1..21: mol_type = other RNA
tcttcctacattgtcaggaca

SEQ ID NO: 252 - RNA, 21 nt, synthetic construct
  source 1..21: mol_type = other RNA
ttcctacattgtcaggacata

SEQ ID NO: 253 - RNA, 21 nt, synthetic construct
  source 1..21: mol_type = other RNA
tcctacattgtcaggacatta

SEQ ID NO: 254 - RNA, 21 nt, synthetic construct
  source 1..21: mol_type = other RNA
ctacattgtcaggacatttca

SEQ ID NO: 255 - RNA, 21 nt, synthetic construct
  source 1..21: mol_type = other RNA
ttcatttagttcatgatcaca

SEQ ID NO: 256 - RNA, 21 nt, synthetic construct
  source 1..21: mol_type = other RNA
ttcatgatcacggtggtagta

SEQ ID NO: 257 - RNA, 21 nt, synthetic construct
  source 1..21: mol_type = other RNA
tcatgatcacggtggtagtaa

SEQ ID NO: 258 - RNA, 21 nt, synthetic construct
  source 1..21: mol_type = other RNA
tgatcacggtggtagtaacaa

SEQ ID NO: 259 - RNA, 21 nt, synthetic construct
  source 1..21: mol_type = other RNA
taagcaccacctaagagatca

SEQ ID NO: 260 - RNA, 21 nt, synthetic construct
  source 1..21: mol_type = other RNA
accacctaagagatctgctca

SEQ ID NO: 261 - RNA, 21 nt, synthetic construct
  source 1..21: mol_type = other RNA
cacctaagagatctgctcata

SEQ ID NO: 262 - RNA, 21 nt, synthetic construct
  source 1..21: mol_type = other RNA
acctaagagatctgctcatca

SEQ ID NO: 263 - RNA, 21 nt, synthetic construct
  source 1..21: mol_type = other RNA
ctaagagatctgctcatctaa

SEQ ID NO: 264 - RNA, 21 nt, synthetic construct
  source 1..21: mol_type = other RNA
atctgctcatctaagcctaaa

SEQ ID NO: 265 - RNA, 21 nt, synthetic construct
  source 1..21: mol_type = other RNA
aagcctaagttggtctgcaga

SEQ ID NO: 266 - RNA, 21 nt, synthetic construct
  source 1..21: mol_type = other RNA
gcctaagttggtctgcaggca

SEQ ID NO: 267 - RNA, 21 nt, synthetic construct
  source 1..21: mol_type = other RNA
gtctgcaggcgtttgaatgaa

SEQ ID NO: 268 - RNA, 21 nt, synthetic construct
  source 1..21: mol_type = other RNA
aatgagttgtggttgccaaga

SEQ ID NO: 269 - RNA, 21 nt, synthetic construct
  source 1..21: mol_type = other RNA
atgagttgtggttgccaagta

SEQ ID NO: 270 - RNA, 21 nt, synthetic construct
  source 1..21: mol_type = other RNA
tgagttgtggttgccaagtaa

SEQ ID NO: 271 - RNA, 21 nt, synthetic construct
  source 1..21: mol_type = other RNA
ttgccaagtaaagtggtgaaa

SEQ ID NO: 272 - RNA, 21 nt, synthetic construct
  source 1..21: mol_type = other RNA
tgccaagtaaagtggtgaaca

SEQ ID NO: 273 - RNA, 21 nt, synthetic construct
  source 1..21: mol_type = other RNA
ccaagtaaagtggtgaactta

SEQ ID NO: 274 - RNA, 21 nt, synthetic construct
  source 1..21: mol_type = other RNA
tggtgaacttacgtggtgata

SEQ ID NO: 275 - RNA, 21 nt, synthetic construct
  source 1..21: mol_type = other RNA
tgaacttacgtggtgattaaa

SEQ ID NO: 276 - RNA, 21 nt, synthetic construct
  source 1..21: mol_type = other RNA
acgtggtgattaatgaaatta

SEQ ID NO: 277 - RNA, 23 nt, synthetic construct
  source 1..23: mol_type = other RNA
  modified_base 7: mod_base = OTHER; note = thymine
tcaggctgcagggttaccgccat

SEQ ID NO: 278 - RNA, 23 nt, synthetic construct
  source 1..23: mol_type = other RNA
  modified_base 7: mod_base = OTHER; note = thymine
tctgggtcactctgtctctgcgg

SEQ ID NO: 279 - RNA, 23 nt, synthetic construct
  source 1..23: mol_type = other RNA
  modified_base 7: mod_base = OTHER; note = thymine
tgttgctgggtcactctgtctct

SEQ ID NO: 280 - RNA, 23 nt, synthetic construct
  source 1..23: mol_type = other RNA
  modified_base 7: mod_base = OTHER; note = thymine
ttgggttgctgggtcactctgtc

SEQ ID NO: 281 - RNA, 23 nt, synthetic construct
  source 1..23: mol_type = other RNA
  modified_base 7: mod_base = OTHER; note = thymine
tctgggttgctgggtcactctgt

SEQ ID NO: 282 - RNA, 23 nt, synthetic construct
  source 1..23: mol_type = other RNA
tctcatgggctctgggttgctgg

SEQ ID NO: 283 - RNA, 23 nt, synthetic construct
  source 1..23: mol_type = other RNA
tcctcatgggctctgggttgctg

SEQ ID NO: 284 - RNA, 23 nt, synthetic construct
  source 1..23: mol_type = other RNA
  modified_base 7: mod_base = OTHER; note = thymine
  modified_base 12: mod_base = OTHER; note = thymine
tcctcatgggctctgggttgctg

SEQ ID NO: 285 - RNA, 23 nt, synthetic construct
  source 1..23: mol_type = other RNA
  modified_base 5: mod_base = OTHER; note = thymine
tccctcatgggctctgggttgct

SEQ ID NO: 286 - RNA, 23 nt, synthetic construct
  source 1..23: mol_type = other RNA
tccctcatgggctctgggttgct

SEQ ID NO: 287 - RNA, 23 nt, synthetic construct
  source 1..23: mol_type = other RNA
  modified_base 7: mod_base = OTHER; note = thymine
tgtccctcatgggctctgggttg

SEQ ID NO: 288 - RNA, 23 nt, synthetic construct
  source 1..23: mol_type = other RNA
taagacccaagtgagggagcggg

SEQ ID NO: 289 - RNA, 23 nt, synthetic construct
  source 1..23: mol_type = other RNA
  modified_base 12: mod_base = OTHER; note = thymine
taagacccaagtgagggagcggg

SEQ ID NO: 290 - RNA, 23 nt, synthetic construct
  source 1..23: mol_type = other RNA
tggaagacccaagtgagggagcg

SEQ ID NO: 291 - RNA, 23 nt, synthetic construct
  source 1..23: mol_type = other RNA
tagggaagacccaagtgagggag

SEQ ID NO: 292 - RNA, 23 nt, synthetic construct
  source 1..23: mol_type = other RNA
taagggaagacccaagtgaggga

SEQ ID NO: 293 - RNA, 23 nt, synthetic construct
  source 1..23: mol_type = other RNA
tgacaagggaagacccaagtgag

SEQ ID NO: 294 - RNA, 23 nt, synthetic construct
  source 1..23: mol_type = other RNA
tggacaagggaagacccaagtga

SEQ ID NO: 295 - RNA, 23 nt, synthetic construct
  source 1..23: mol_type = other RNA
taggacaagggaagacccaagtg

SEQ ID NO: 296 - RNA, 23 nt, synthetic construct
  source 1..23: mol_type = other RNA
tagaggacaagggaagacccaag

SEQ ID NO: 297 - RNA, 23 nt, synthetic construct
  source 1..23: mol_type = other RNA
tgcgagaggacaagggaagaccc

SEQ ID NO: 298 - RNA, 23 nt, synthetic construct
  source 1..23: mol_type = other RNA
tcgcgagaggacaagggaagacc

SEQ ID NO: 299 - RNA, 23 nt, synthetic construct
  source 1..23: mol_type = other RNA
ttcgcgagaggacaagggaagac

SEQ ID NO: 300 - RNA, 23 nt, synthetic construct
  source 1..23: mol_type = other RNA
  modified_base 2: mod_base = OTHER; note = thymine
ttcgcgagaggacaagggaagac

SEQ ID NO: 301 - RNA, 23 nt, synthetic construct
  source 1..23: mol_type = other RNA
tctcgcgagaggacaagggaaga

SEQ ID NO: 302 - RNA, 23 nt, synthetic construct
  source 1..23: mol_type = other RNA
tcctcgcgagaggacaagggaag

SEQ ID NO: 303 - RNA, 23 nt, synthetic construct
  source 1..23: mol_type = other RNA
tccctcgcgagaggacaagggaa

SEQ ID NO: 304 - RNA, 23 nt, synthetic construct
  source 1..23: mol_type = other RNA
  modified_base 5: mod_base = OTHER; note = thymine
tccctcgcgagaggacaagggaa

SEQ ID NO: 305 - RNA, 23 nt, synthetic construct
  source 1..23: mol_type = other RNA
tctcggtgaattcaggacaggcc

SEQ ID NO: 306 - RNA, 23 nt, synthetic construct
  source 1..23: mol_type = other RNA
  modified_base 7: mod_base = OTHER; note = thymine
  modified_base 12: mod_base = OTHER; note = thymine
tctcggtgaattcaggacaggcc

SEQ ID NO: 307 - RNA, 23 nt, synthetic construct
  source 1..23: mol_type = other RNA
tcctcggtgaattcaggacaggc

SEQ ID NO: 308 - RNA, 23 nt, synthetic construct
  source 1..23: mol_type = other RNA
  modified_base 12: mod_base = OTHER; note = thymine
tcctcggtgaattcaggacaggc

SEQ ID NO: 309 - RNA, 23 nt, synthetic construct
  source 1..23: mol_type = other RNA
tccctcggtgaattcaggacagg

SEQ ID NO: 310 - RNA, 23 nt, synthetic construct
  source 1..23: mol_type = other RNA
  modified_base 5: mod_base = OTHER; note = thymine
tccctcggtgaattcaggacagg

SEQ ID NO: 311 - RNA, 23 nt, synthetic construct
  source 1..23: mol_type = other RNA
  modified_base 7: mod_base = OTHER; note = thymine
ttcgcatcctgcgaagggcgaga

SEQ ID NO: 312 - RNA, 23 nt, synthetic construct
  source 1..23: mol_type = other RNA
tttcgcatcctgcgaagggcgag

SEQ ID NO: 313 - RNA, 23 nt, synthetic construct
  source 1..23: mol_type = other RNA
tcttcgcatcctgcgaagggcga

SEQ ID NO: 314 - RNA, 23 nt, synthetic construct
  source 1..23: mol_type = other RNA
  modified_base 12: mod_base = OTHER; note = thymine
tcttcgcatcctgcgaagggcga

SEQ ID NO: 315 - RNA, 23 nt, synthetic construct
  source 1..23: mol_type = other RNA
tctcttcgcatcctgcgaagggc

SEQ ID NO: 316 - RNA, 23 nt, synthetic construct
  source 1..23: mol_type = other RNA
  modified_base 5: mod_base = OTHER; note = thymine
tctcttcgcatcctgcgaagggc

SEQ ID NO: 317 - RNA, 23 nt, synthetic construct
  source 1..23: mol_type = other RNA
  modified_base 7: mod_base = OTHER; note = thymine
tactcttcgcatcctgcgaaggg

SEQ ID NO: 318 - RNA, 23 nt, synthetic construct
  source 1..23: mol_type = other RNA
  modified_base 5: mod_base = OTHER; note = thymine
  modified_base 7: mod_base = OTHER; note = thymine
taactcttcgcatcctgcgaagg

SEQ ID NO: 319 - RNA, 23 nt, synthetic construct
  source 1..23: mol_type = other RNA
tcaactcttcgcatcctgcgaag

SEQ ID NO: 320 - RNA, 23 nt, synthetic construct
  source 1..23: mol_type = other RNA
tccaactcttcgcatcctgcgaa

SEQ ID NO: 321 - RNA, 23 nt, synthetic construct
  source 1..23: mol_type = other RNA
  modified_base 7: mod_base = OTHER; note = thymine
tccaactcttcgcatcctgcgaa

SEQ ID NO: 322 - RNA, 23 nt, synthetic construct
  source 1..23: mol_type = other RNA
tcccaactcttcgcatcctgcga

SEQ ID NO: 323 - RNA, 23 nt, synthetic construct
  source 1..23: mol_type = other RNA
  modified_base 7: mod_base = OTHER; note = thymine
tcgccctggtttctcgcaaataa

SEQ ID NO: 324 - RNA, 23 nt, synthetic construct
  source 1..23: mol_type = other RNA
tcgccctggtttctcgcaaataa

SEQ ID NO: 325 - RNA, 23 nt, synthetic construct
  source 1..23: mol_type = other RNA
  modified_base 7: mod_base = OTHER; note = thymine
  modified_base 12: mod_base = OTHER; note = thymine
tcgccctggtttctcgcaaataa

SEQ ID NO: 326 - RNA, 23 nt, synthetic construct
  source 1..23: mol_type = other RNA
tccgccctggtttctcgcaaata

SEQ ID NO: 327 - RNA, 23 nt, synthetic construct
  source 1..23: mol_type = other RNA
  modified_base 12: mod_base = OTHER; note = thymine
tccgccctggtttctcgcaaata

SEQ ID NO: 328 - RNA, 23 nt, synthetic construct
  source 1..23: mol_type = other RNA
tcccgccctggtttctcgcaaat

SEQ ID NO: 329 - RNA, 23 nt, synthetic construct
  source 1..23: mol_type = other RNA
  modified_base 12: mod_base = OTHER; note = thymine
tcccgccctggtttctcgcaaat

SEQ ID NO: 330 - RNA, 23 nt, synthetic construct
  source 1..23: mol_type = other RNA
  modified_base 5: mod_base = OTHER; note = thymine
  modified_base 7: mod_base = OTHER; note = thymine
tttctcttcacaacgcagttaaa

SEQ ID NO: 331 - RNA, 23 nt, synthetic construct
  source 1..23: mol_type = other RNA
  modified_base 5: mod_base = OTHER; note = thymine
  modified_base 7: mod_base = OTHER; note = thymine
tagttctcttcacaacgcagtta

SEQ ID NO: 332 - RNA, 23 nt, synthetic construct
  source 1..23: mol_type = other RNA
  modified_base 7: mod_base = OTHER; note = thymine
tcaagttctcttcacaacgcagt

SEQ ID NO: 333 - RNA, 23 nt, synthetic construct
  source 1..23: mol_type = other RNA
tcaagttctcttcacaacgcagt

SEQ ID NO: 334 - RNA, 23 nt, synthetic construct
  source 1..23: mol_type = other RNA
  modified_base 7: mod_base = OTHER; note = thymine
  modified_base 12: mod_base = OTHER; note = thymine
tcaagttctcttcacaacgcagt

SEQ ID NO: 335 - RNA, 23 nt, synthetic construct
  source 1..23: mol_type = other RNA
tccaagttctcttcacaacgcag

SEQ ID NO: 336 - RNA, 23 nt, synthetic construct
  source 1..23: mol_type = other RNA
  modified_base 7: mod_base = OTHER; note = thymine
  modified_base 12: mod_base = OTHER; note = thymine
tccaagttctcttcacaacgcag

SEQ ID NO: 337 - RNA, 23 nt, synthetic construct
  source 1..23: mol_type = other RNA
tctccaagttctcttcacaacgc

SEQ ID NO: 338 - RNA, 23 nt, synthetic construct
  source 1..23: mol_type = other RNA
  modified_base 12: mod_base = OTHER; note = thymine
tctccaagttctcttcacaacgc

SEQ ID NO: 339 - RNA, 23 nt, synthetic construct
  source 1..23: mol_type = other RNA
tctcctccaagttctcttcacaa

SEQ ID NO: 340 - RNA, 23 nt, synthetic construct
  source 1..23: mol_type = other RNA
  modified_base 12: mod_base = OTHER; note = thymine
tctcctccaagttctcttcacaa

SEQ ID NO: 341 - RNA, 23 nt, synthetic construct
  source 1..23: mol_type = other RNA
  modified_base 7: mod_base = OTHER; note = thymine
tgctcctccaagttctcttcaca

SEQ ID NO: 342 - RNA, 23 nt, synthetic construct
  source 1..23: mol_type = other RNA
  modified_base 7: mod_base = OTHER; note = thymine
ttcggctcctccaagttctcttc

SEQ ID NO: 343 - RNA, 23 nt, synthetic construct
  source 1..23: mol_type = other RNA
tctcggctcctccaagttctctt

SEQ ID NO: 344 - RNA, 23 nt, synthetic construct
  source 1..23: mol_type = other RNA
tcaaatctcggctcctccaagtt

SEQ ID NO: 345 - RNA, 23 nt, synthetic construct
  source 1..23: mol_type = other RNA
tgcaaatctcggctcctccaagt

SEQ ID NO: 346 - RNA, 23 nt, synthetic construct
  source 1..23: mol_type = other RNA
  modified_base 7: mod_base = OTHER; note = thymine
tgcaaatctcggctcctccaagt

SEQ ID NO: 347 - RNA, 23 nt, synthetic construct
  source 1..23: mol_type = other RNA
tagcaaatctcggctcctccaag

SEQ ID NO: 348 - RNA, 23 nt, synthetic construct
  source 1..23: mol_type = other RNA
tgagcaaatctcggctcctccaa

SEQ ID NO: 349 - RNA, 23 nt, synthetic construct
  source 1..23: mol_type = other RNA
ttgagcaaatctcggctcctcca

SEQ ID NO: 350 - RNA, 23 nt, synthetic construct
  source 1..23: mol_type = other RNA
  modified_base 5: mod_base = OTHER; note = thymine
tcactgagcaaatctcggctcct

SEQ ID NO: 351 - RNA, 23 nt, synthetic construct
  source 1..23: mol_type = other RNA
  modified_base 7: mod_base = OTHER; note = thymine
tggcactgagcaaatctcggctc

SEQ ID NO: 352 - RNA, 23 nt, synthetic construct
  source 1..23: mol_type = other RNA
tgtggcactgagcaaatctcggc

SEQ ID NO: 353 - RNA, 23 nt, synthetic construct
  source 1..23: mol_type = other RNA
  modified_base 7: mod_base = OTHER; note = thymine
tggaagtggcactgagcaaatct

SEQ ID NO: 354 - RNA, 23 nt, synthetic construct
  source 1..23: mol_type = other RNA
tagggaagtggcactgagcaaat

SEQ ID NO: 355 - RNA, 23 nt, synthetic construct
  source 1..23: mol_type = other RNA
tgagggaagtggcactgagcaaa

SEQ ID NO: 356 - RNA, 23 nt, synthetic construct
  source 1..23: mol_type = other RNA
ttagaagagggaagtggcactga

SEQ ID NO: 357 - RNA, 23 nt, synthetic construct
  source 1..23: mol_type = other RNA
  modified_base 2: mod_base = OTHER; note = thymine
ttagaagagggaagtggcactga

SEQ ID NO: 358 - RNA, 23 nt, synthetic construct
  source 1..23: mol_type = other RNA
tgactagaagagggaagtggcac

SEQ ID NO: 359 - RNA, 23 nt, synthetic construct
  source 1..23: mol_type = other RNA
  modified_base 5: mod_base = OTHER; note = thymine
tgactagaagagggaagtggcac

SEQ ID NO: 360 - RNA, 23 nt, synthetic construct
  source 1..23: mol_type = other RNA
tagactagaagagggaagtggca

SEQ ID NO: 361 - RNA, 23 nt, synthetic construct
  source 1..23: mol_type = other RNA
  modified_base 7: mod_base = OTHER; note = thymine
tcagactagaagagggaagtggc

SEQ ID NO: 362 - RNA, 23 nt, synthetic construct
  source 1..23: mol_type = other RNA
tcagactagaagagggaagtggc

SEQ ID NO: 363 - RNA, 23 nt, synthetic construct
  source 1..23: mol_type = other RNA
ttcagactagaagagggaagtgg

SEQ ID NO: 364 - RNA, 23 nt, synthetic construct
  source 1..23: mol_type = other RNA
tctcagactagaagagggaagtg

SEQ ID NO: 365 - RNA, 23 nt, synthetic construct
  source 1..23: mol_type = other RNA
  modified_base 5: mod_base = OTHER; note = thymine
tctctcagactagaagagggaag

SEQ ID NO: 366 - RNA, 23 nt, synthetic construct
  source 1..23: mol_type = other RNA
  modified_base 5: mod_base = OTHER; note = thymine
  modified_base 7: mod_base = OTHER; note = thymine
tccctctcagactagaagaggga

SEQ ID NO: 367 - RNA, 23 nt, synthetic construct
  source 1..23: mol_type = other RNA
tccctctcagactagaagaggga

SEQ ID NO: 368 - RNA, 23 nt, synthetic construct
  source 1..23: mol_type = other RNA
  modified_base 7: mod_base = OTHER; note = thymine
tttccctctcagactagaagagg

SEQ ID NO: 369 - RNA, 23 nt, synthetic construct
  source 1..23: mol_type = other RNA
tcttccctctcagactagaagag

SEQ ID NO: 370 - RNA, 23 nt, synthetic construct
  source 1..23: mol_type = other RNA
tctcttccctctcagactagaag

SEQ ID NO: 371 - RNA, 23 nt, synthetic construct
  source 1..23: mol_type = other RNA
  modified_base 5: mod_base = OTHER; note = thymine
  modified_base 12: mod_base = OTHER; note = thymine
tctcttccctctcagactagaag

SEQ ID NO: 372 - RNA, 23 nt, synthetic construct
  source 1..23: mol_type = other RNA
  modified_base 7: mod_base = OTHER; note = thymine
tcctcttccctctcagactagaa

SEQ ID NO: 373 - RNA, 23 nt, synthetic construct
  source 1..23: mol_type = other RNA
tcctcttccctctcagactagaa

SEQ ID NO: 374 - RNA, 23 nt, synthetic construct
  source 1..23: mol_type = other RNA
  modified_base 5: mod_base = OTHER; note = thymine
  modified_base 7: mod_base = OTHER; note = thymine
tccctcttccctctcagactaga

SEQ ID NO: 375 - RNA, 23 nt, synthetic construct
  source 1..23: mol_type = other RNA
tccctcttccctctcagactaga

SEQ ID NO: 376 - RNA, 23 nt, synthetic construct
  source 1..23: mol_type = other RNA
  modified_base 7: mod_base = OTHER; note = thymine
tagccctcttccctctcagacta

SEQ ID NO: 377 - RNA, 23 nt, synthetic construct
  source 1..23: mol_type = other RNA
tcagccctcttccctctcagact

SEQ ID NO: 378 - RNA, 23 nt, synthetic construct
  source 1..23: mol_type = other RNA
tccagccctcttccctctcagac

SEQ ID NO: 379 - RNA, 23 nt, synthetic construct
  source 1..23: mol_type = other RNA
  modified_base 12: mod_base = OTHER; note = thymine
tccagccctcttccctctcagac

SEQ ID NO: 380 - RNA, 23 nt, synthetic construct
  source 1..23: mol_type = other RNA
tcacatctctccagctccaaacc

SEQ ID NO: 381 - RNA, 23 nt, synthetic construct
  source 1..23: mol_type = other RNA
tccacatctctccagctccaaac

SEQ ID NO: 382 - RNA, 23 nt, synthetic construct
  source 1..23: mol_type = other RNA
  modified_base 7: mod_base = OTHER; note = thymine
tccacatctctccagctccaaac

SEQ ID NO: 383 - RNA, 23 nt, synthetic construct
  source 1..23: mol_type = other RNA
tagcattatgtcatccactgccc

SEQ ID NO: 384 - RNA, 23 nt, synthetic construct
  source 1..23: mol_type = other RNA
  modified_base 7: mod_base = OTHER; note = thymine
tagcattatgtcatccactgccc

SEQ ID NO: 385 - RNA, 23 nt, synthetic construct
  source 1..23: mol_type = other RNA
  modified_base 7: mod_base = OTHER; note = thymine
taagcattatgtcatccactgcc

SEQ ID NO: 386 - RNA, 23 nt, synthetic construct
  source 1..23: mol_type = other RNA
taagcattatgtcatccactgcc

SEQ ID NO: 387 - RNA, 23 nt, synthetic construct
  source 1..23: mol_type = other RNA
  modified_base 7: mod_base = OTHER; note = thymine
  modified_base 12: mod_base = OTHER; note = thymine
taagcattatgtcatccactgcc

SEQ ID NO: 388 - RNA, 23 nt, synthetic construct
  source 1..23: mol_type = other RNA
tactcccgccgaggcgtcctaaa

SEQ ID NO: 389 - RNA, 23 nt, synthetic construct
  source 1..23: mol_type = other RNA
  modified_base 7: mod_base = OTHER; note = thymine
ttcccattggacgcgccctcact

SEQ ID NO: 390 - RNA, 23 nt, synthetic construct
  source 1..23: mol_type = other RNA
ttcccattggacgcgccctcact

SEQ ID NO: 391 - RNA, 23 nt, synthetic construct
  source 1..23: mol_type = other RNA
  modified_base 2: mod_base = OTHER; note = thymine
  modified_base 7: mod_base = OTHER; note = thymine
ttcccattggacgcgccctcact

SEQ ID NO: 392 - RNA, 23 nt, synthetic construct
  source 1..23: mol_type = other RNA
  modified_base 7: mod_base = OTHER; note = thymine
tagaaatctcccattggacgcgc

SEQ ID NO: 393 - RNA, 23 nt, synthetic construct
  source 1..23: mol_type = other RNA
tagaaatctcccattggacgcgc

SEQ ID NO: 394 - RNA, 23 nt, synthetic construct
  source 1..23: mol_type = other RNA
taagaaatctcccattggacgcg

SEQ ID NO: 395 - RNA, 23 nt, synthetic construct
  source 1..23: mol_type = other RNA
  modified_base 7: mod_base = OTHER; note = thymine
tgagcctcaaatctcaggctgtt

SEQ ID NO: 396 - RNA, 23 nt, synthetic construct
  source 1..23: mol_type = other RNA
tggaagagcctcaaatctcaggc

SEQ ID NO: 397 - RNA, 23 nt, synthetic construct
  source 1..23: mol_type = other RNA
taggaagagcctcaaatctcagg

SEQ ID NO: 398 - RNA, 23 nt, synthetic construct
  source 1..23: mol_type = other RNA
  modified_base 12: mod_base = OTHER; note = thymine
taggaagagcctcaaatctcagg

SEQ ID NO: 399 - RNA, 23 nt, synthetic construct
  source 1..23: mol_type = other RNA
ttaggaagagcctcaaatctcag

SEQ ID NO: 400 - RNA, 23 nt, synthetic construct
  source 1..23: mol_type = other RNA
  modified_base 2: mod_base = OTHER; note = thymine
ttaggaagagcctcaaatctcag

SEQ ID NO: 401 - RNA, 23 nt, synthetic construct
  source 1..23: mol_type = other RNA
tgtaggaagagcctcaaatctca

SEQ ID NO: 402 - RNA, 23 nt, synthetic construct
  source 1..23: mol_type = other RNA
taatgtaggaagagcctcaaatc

SEQ ID NO: 403 - RNA, 23 nt, synthetic construct
  source 1..23: mol_type = other RNA
tacaatgtaggaagagcctcaaa

SEQ ID NO: 404 - RNA, 23 nt, synthetic construct
  source 1..23: mol_type = other RNA
tgacaatgtaggaagagcctcaa

SEQ ID NO: 405 - RNA, 23 nt, synthetic construct
  source 1..23: mol_type = other RNA
  modified_base 7: mod_base = OTHER; note = thymine
tgacaatgtaggaagagcctcaa

SEQ ID NO: 406 - RNA, 23 nt, synthetic construct
  source 1..23: mol_type = other RNA
ttgacaatgtaggaagagcctca

SEQ ID NO: 407 - RNA, 23 nt, synthetic construct
  source 1..23: mol_type = other RNA
  modified_base 2: mod_base = OTHER; note = thymine
ttgacaatgtaggaagagcctca

SEQ ID NO: 408 - RNA, 23 nt, synthetic construct
  source 1..23: mol_type = other RNA
tctgacaatgtaggaagagcctc

SEQ ID NO: 409 - RNA, 23 nt, synthetic construct
  source 1..23: mol_type = other RNA
tcctgacaatgtaggaagagcct

SEQ ID NO: 410 - RNA, 23 nt, synthetic construct
  source 1..23: mol_type = other RNA
  modified_base 12: mod_base = OTHER; note = thymine
tcctgacaatgtaggaagagcct

SEQ ID NO: 411 - RNA, 23 nt, synthetic construct
  source 1..23: mol_type = other RNA
  modified_base 5: mod_base = OTHER; note = thymine
ttcctgacaatgtaggaagagcc

SEQ ID NO: 412 - RNA, 23 nt, synthetic construct
  source 1..23: mol_type = other RNA
  modified_base 7: mod_base = OTHER; note = thymine
ttgtcctgacaatgtaggaagag

SEQ ID NO: 413 - RNA, 23 nt, synthetic construct
  source 1..23: mol_type = other RNA
  modified_base 7: mod_base = OTHER; note = thymine
ttgaaatgtcctgacaatgtagg

SEQ ID NO: 414 - RNA, 23 nt, synthetic construct
  source 1..23: mol_type = other RNA
ttgaaatgtcctgacaatgtagg

SEQ ID NO: 415 - RNA, 23 nt, synthetic construct
  source 1..23: mol_type = other RNA
  modified_base 2: mod_base = OTHER; note = thymine
  modified_base 7: mod_base = OTHER; note = thymine
  modified_base 12: mod_base = OTHER; note = thymine
ttgaaatgtcctgacaatgtagg

SEQ ID NO: 416 - RNA, 23 nt, synthetic construct
  source 1..23: mol_type = other RNA
tatgaaatgtcctgacaatgtag

SEQ ID NO: 417 - RNA, 23 nt, synthetic construct
  source 1..23: mol_type = other RNA
taatgaaatgtcctgacaatgta

SEQ ID NO: 418 - RNA, 23 nt, synthetic construct
  source 1..23: mol_type = other RNA
ttaaatgaaatgtcctgacaatg

SEQ ID NO: 419 - RNA, 23 nt, synthetic construct
  source 1..23: mol_type = other RNA
  modified_base 2: mod_base = OTHER; note = thymine
ttaaatgaaatgtcctgacaatg

SEQ ID NO: 420 - RNA, 23 nt, synthetic construct
  source 1..23: mol_type = other RNA
taactaaatgaaatgtcctgaca

SEQ ID NO: 421 - RNA, 23 nt, synthetic construct
  source 1..23: mol_type = other RNA
  modified_base 5: mod_base = OTHER; note = thymine
taactaaatgaaatgtcctgaca

SEQ ID NO: 422 - RNA, 23 nt, synthetic construct
  source 1..23: mol_type = other RNA
tgaactaaatgaaatgtcctgac

SEQ ID NO: 423 - RNA, 23 nt, synthetic construct
  source 1..23: mol_type = other RNA
  modified_base 7: mod_base = OTHER; note = thymine
ttgaactaaatgaaatgtcctga

SEQ ID NO: 424 - RNA, 23 nt, synthetic construct
  source 1..23: mol_type = other RNA
tatgaactaaatgaaatgtcctg

SEQ ID NO: 425 - RNA, 23 nt, synthetic construct
  source 1..23: mol_type = other RNA
  modified_base 12: mod_base = OTHER; note = thymine
tatgaactaaatgaaatgtcctg

SEQ ID NO: 426 - RNA, 23 nt, synthetic construct
  source 1..23: mol_type = other RNA
  modified_base 5: mod_base = OTHER; note = thymine
ttcatgaactaaatgaaatgtcc

SEQ ID NO: 427 - RNA, 23 nt, synthetic construct
  source 1..23: mol_type = other RNA
ttcatgaactaaatgaaatgtcc

SEQ ID NO: 428 - RNA, 23 nt, synthetic construct
  source 1..23: mol_type = other RNA
  modified_base 5: mod_base = OTHER; note = thymine
ttgatcatgaactaaatgaaatg

SEQ ID NO: 429 - RNA, 23 nt, synthetic construct
  source 1..23: mol_type = other RNA
  modified_base 7: mod_base = OTHER; note = thymine
tcgtgatcatgaactaaatgaaa

SEQ ID NO: 430 - RNA, 23 nt, synthetic construct
  source 1..23: mol_type = other RNA
tcgtgatcatgaactaaatgaaa

SEQ ID NO: 431 - RNA, 23 nt, synthetic construct
  source 1..23: mol_type = other RNA
  modified_base 5: mod_base = OTHER; note = thymine
tccgtgatcatgaactaaatgaa

SEQ ID NO: 432 - RNA, 23 nt, synthetic construct
  source 1..23: mol_type = other RNA
tccgtgatcatgaactaaatgaa

SEQ ID NO: 433 - RNA, 23 nt, synthetic construct
  source 1..23: mol_type = other RNA
taccgtgatcatgaactaaatga

SEQ ID NO: 434 - RNA, 23 nt, synthetic construct
  source 1..23: mol_type = other RNA
  modified_base 12: mod_base = OTHER; note = thymine
taccgtgatcatgaactaaatga

SEQ ID NO: 435 - RNA, 23 nt, synthetic construct
  source 1..23: mol_type = other RNA
tcaccgtgatcatgaactaaatg

SEQ ID NO: 436 - RNA, 23 nt, synthetic construct
  source 1..23: mol_type = other RNA
  modified_base 7: mod_base = OTHER; note = thymine
tcaccgtgatcatgaactaaatg

SEQ ID NO: 437 - RNA, 23 nt, synthetic construct
  source 1..23: mol_type = other RNA
tccaccgtgatcatgaactaaat

SEQ ID NO: 438 - RNA, 23 nt, synthetic construct
  source 1..23: mol_type = other RNA
taccaccgtgatcatgaactaaa

SEQ ID NO: 439 - RNA, 23 nt, synthetic construct
  source 1..23: mol_type = other RNA
  modified_base 12: mod_base = OTHER; note = thymine
taccaccgtgatcatgaactaaa

SEQ ID NO: 440 - RNA, 23 nt, synthetic construct
  source 1..23: mol_type = other RNA
ttaccaccgtgatcatgaactaa

SEQ ID NO: 441 - RNA, 23 nt, synthetic construct
  source 1..23: mol_type = other RNA
tctaccaccgtgatcatgaacta

SEQ ID NO: 442 - RNA, 23 nt, synthetic construct
  source 1..23: mol_type = other RNA
tttactaccaccgtgatcatgaa

SEQ ID NO: 443 - RNA, 23 nt, synthetic construct
  source 1..23: mol_type = other RNA
  modified_base 7: mod_base = OTHER; note = thymine
tgttactaccaccgtgatcatga

SEQ ID NO: 444 - RNA, 23 nt, synthetic construct
  source 1..23: mol_type = other RNA
  modified_base 5: mod_base = OTHER; note = thymine
tgtgttactaccaccgtgatcat

SEQ ID NO: 445 - RNA, 23 nt, synthetic construct
  source 1..23: mol_type = other RNA
tgtgttactaccaccgtgatcat

SEQ ID NO: 446 - RNA, 23 nt, synthetic construct
  source 1..23: mol_type = other RNA
  modified_base 7: mod_base = OTHER; note = thymine
tcgtgttactaccaccgtgatca

SEQ ID NO: 447 - RNA, 23 nt, synthetic construct
  source 1..23: mol_type = other RNA
tcgtgttactaccaccgtgatca

SEQ ID NO: 448 - RNA, 23 nt, synthetic construct
  source 1..23: mol_type = other RNA
  modified_base 5: mod_base = OTHER; note = thymine
  modified_base 7: mod_base = OTHER; note = thymine
ttcgtgttactaccaccgtgatc

SEQ ID NO: 449 - RNA, 23 nt, synthetic construct
  source 1..23: mol_type = other RNA
tatcgtgttactaccaccgtgat

SEQ ID NO: 450 - RNA, 23 nt, synthetic construct
  source 1..23: mol_type = other RNA
taatcgtgttactaccaccgtga

SEQ ID NO: 451 - RNA, 23 nt, synthetic construct
  source 1..23: mol_type = other RNA
  modified_base 7: mod_base = OTHER; note = thymine
taatcgtgttactaccaccgtga

SEQ ID NO: 452 - RNA, 23 nt, synthetic construct
  source 1..23: mol_type = other RNA
  modified_base 7: mod_base = OTHER; note = thymine
tgcagatctcttaggtggtgctt

SEQ ID NO: 453 - RNA, 23 nt, synthetic construct
  source 1..23: mol_type = other RNA
tagcagatctcttaggtggtgct

SEQ ID NO: 454 - RNA, 23 nt, synthetic construct
  source 1..23: mol_type = other RNA
ttgagcagatctcttaggtggtg

SEQ ID NO: 455 - RNA, 23 nt, synthetic construct
  source 1..23: mol_type = other RNA
  modified_base 5: mod_base = OTHER; note = thymine
tagatgagcagatctcttaggtg

SEQ ID NO: 456 - RNA, 23 nt, synthetic construct
  source 1..23: mol_type = other RNA
  modified_base 7: mod_base = OTHER; note = thymine
tttagatgagcagatctcttagg

SEQ ID NO: 457 - RNA, 23 nt, synthetic construct
  source 1..23: mol_type = other RNA
tcttagatgagcagatctcttag

SEQ ID NO: 458 - RNA, 23 nt, synthetic construct
  source 1..23: mol_type = other RNA
tgcttagatgagcagatctctta

SEQ ID NO: 459 - RNA, 23 nt, synthetic construct
  source 1..23: mol_type = other RNA
  modified_base 5: mod_base = OTHER; note = thymine
tgcttagatgagcagatctctta

SEQ ID NO: 460 - RNA, 23 nt, synthetic construct
  source 1..23: mol_type = other RNA
  modified_base 5: mod_base = OTHER; note = thymine
tggcttagatgagcagatctctt

SEQ ID NO: 461 - RNA, 23 nt, synthetic construct
  source 1..23: mol_type = other RNA
tggcttagatgagcagatctctt

SEQ ID NO: 462 - RNA, 23 nt, synthetic construct
  source 1..23: mol_type = other RNA
  modified_base 7: mod_base = OTHER; note = thymine
taggcttagatgagcagatctct

SEQ ID NO: 463 - RNA, 23 nt, synthetic construct
  source 1..23: mol_type = other RNA
  modified_base 7: mod_base = OTHER; note = thymine
ttaggcttagatgagcagatctc

SEQ ID NO: 464 - RNA, 23 nt, synthetic construct
  source 1..23: mol_type = other RNA
tacttaggcttagatgagcagat

SEQ ID NO: 465 - RNA, 23 nt, synthetic construct
  source 1..23: mol_type = other RNA
  modified_base 5: mod_base = OTHER; note = thymine
tacttaggcttagatgagcagat

SEQ ID NO: 466 - RNA, 23 nt, synthetic construct
  source 1..23: mol_type = other RNA
  modified_base 5: mod_base = OTHER; note = thymine
taacttaggcttagatgagcaga

SEQ ID NO: 467 - RNA, 23 nt, synthetic construct
  source 1..23: mol_type = other RNA
taacttaggcttagatgagcaga

SEQ ID NO: 468 - RNA, 23 nt, synthetic construct
  source 1..23: mol_type = other RNA
  modified_base 5: mod_base = OTHER; note = thymine
  modified_base 12: mod_base = OTHER; note = thymine
taacttaggcttagatgagcaga

SEQ ID NO: 469 - RNA, 23 nt, synthetic construct
  source 1..23: mol_type = other RNA
tcaacttaggcttagatgagcag

SEQ ID NO: 470 - RNA, 23 nt, synthetic construct
  source 1..23: mol_type = other RNA
  modified_base 7: mod_base = OTHER; note = thymine
  modified_base 12: mod_base = OTHER; note = thymine
tcaacttaggcttagatgagcag

SEQ ID NO: 471 - RNA, 23 nt, synthetic construct
  source 1..23: mol_type = other RNA
tccaacttaggcttagatgagca

SEQ ID NO: 472 - RNA, 23 nt, synthetic construct
  source 1..23: mol_type = other RNA
  modified_base 7: mod_base = OTHER; note = thymine
tccaacttaggcttagatgagca

SEQ ID NO: 473 - RNA, 23 nt, synthetic construct
  source 1..23: mol_type = other RNA
taccaacttaggcttagatgagc

SEQ ID NO: 474 - RNA, 23 nt, synthetic construct
  source 1..23: mol_type = other RNA
tgaccaacttaggcttagatgag

SEQ ID NO: 475 - RNA, 23 nt, synthetic construct
  source 1..23: mol_type = other RNA
tagaccaacttaggcttagatga

SEQ ID NO: 476 - RNA, 23 nt, synthetic construct
  source 1..23: mol_type = other RNA
tcagaccaacttaggcttagatg

SEQ ID NO: 477 - RNA, 23 nt, synthetic construct
  source 1..23: mol_type = other RNA
  modified_base 12: mod_base = OTHER; note = thymine
tcagaccaacttaggcttagatg

SEQ ID NO: 478 - RNA, 23 nt, synthetic construct
  source 1..23: mol_type = other RNA
tgcagaccaacttaggcttagat

SEQ ID NO: 479 - RNA, 23 nt, synthetic construct
  source 1..23: mol_type = other RNA
ttgcagaccaacttaggcttaga

SEQ ID NO: 480 - RNA, 23 nt, synthetic construct
  source 1..23: mol_type = other RNA
tcctgcagaccaacttaggctta

SEQ ID NO: 481 - RNA, 23 nt, synthetic construct
  source 1..23: mol_type = other RNA
tcgcctgcagaccaacttaggct

SEQ ID NO: 482 - RNA, 23 nt, synthetic construct
  source 1..23: mol_type = other RNA
  modified_base 7: mod_base = OTHER; note = thymine
tacgcctgcagaccaacttaggc

SEQ ID NO: 483 - RNA, 23 nt, synthetic construct
  source 1..23: mol_type = other RNA
taacgcctgcagaccaacttagg

SEQ ID NO: 484 - RNA, 23 nt, synthetic construct
  source 1..23: mol_type = other RNA
tcaaacgcctgcagaccaactta

SEQ ID NO: 485 - RNA, 23 nt, synthetic construct
  source 1..23: mol_type = other RNA
tattcaaacgcctgcagaccaac

SEQ ID NO: 486 - RNA, 23 nt, synthetic construct
  source 1..23: mol_type = other RNA
  modified_base 5: mod_base = OTHER; note = thymine
tcattcaaacgcctgcagaccaa

SEQ ID NO: 487 - RNA, 23 nt, synthetic construct
  source 1..23: mol_type = other RNA
tcattcaaacgcctgcagaccaa

SEQ ID NO: 488 - RNA, 23 nt, synthetic construct
  source 1..23: mol_type = other RNA
tctcattcaaacgcctgcagacc

SEQ ID NO: 489 - RNA, 23 nt, synthetic construct
  source 1..23: mol_type = other RNA
  modified_base 7: mod_base = OTHER; note = thymine
tctcattcaaacgcctgcagacc

SEQ ID NO: 490 - RNA, 23 nt, synthetic construct
  source 1..23: mol_type = other RNA
  modified_base 7: mod_base = OTHER; note = thymine
tactcattcaaacgcctgcagac

SEQ ID NO: 491 - RNA, 23 nt, synthetic construct
  source 1..23: mol_type = other RNA
tactcattcaaacgcctgcagac

SEQ ID NO: 492 - RNA, 23 nt, synthetic construct
  source 1..23: mol_type = other RNA
  modified_base 5: mod_base = OTHER; note = thymine
taactcattcaaacgcctgcaga

SEQ ID NO: 493 - RNA, 23 nt, synthetic construct
  source 1..23: mol_type = other RNA
tcaactcattcaaacgcctgcag

SEQ ID NO: 494 - RNA, 23 nt, synthetic construct
  source 1..23: mol_type = other RNA
  modified_base 7: mod_base = OTHER; note = thymine
tacaactcattcaaacgcctgca

SEQ ID NO: 495 - RNA, 23 nt, synthetic construct
  source 1..23: mol_type = other RNA
tacaactcattcaaacgcctgca

SEQ ID NO: 496 - RNA, 23 nt, synthetic construct
  source 1..23: mol_type = other RNA
tcacaactcattcaaacgcctgc

SEQ ID NO: 497 - RNA, 23 nt, synthetic construct
  source 1..23: mol_type = other RNA
  modified_base 12: mod_base = OTHER; note = thymine
tcacaactcattcaaacgcctgc

SEQ ID NO: 498 - RNA, 23 nt, synthetic construct
  source 1..23: mol_type = other RNA
taccacaactcattcaaacgcct

SEQ ID NO: 499 - RNA, 23 nt, synthetic construct
  source 1..23: mol_type = other RNA
tcaaccacaactcattcaaacgc

SEQ ID NO: 500 - RNA, 23 nt, synthetic construct
  source 1..23: mol_type = other RNA
  modified_base 12: mod_base = OTHER; note = thymine
tcaaccacaactcattcaaacgc

SEQ ID NO: 501 - RNA, 23 nt, synthetic construct
  source 1..23: mol_type = other RNA
tgcaaccacaactcattcaaacg

SEQ ID NO: 502 - RNA, 23 nt, synthetic construct
  source 1..23: mol_type = other RNA
tggcaaccacaactcattcaaac

SEQ ID NO: 503 - RNA, 23 nt, synthetic construct
  source 1..23: mol_type = other RNA
ttggcaaccacaactcattcaaa

SEQ ID NO: 504 - RNA, 23 nt, synthetic construct
  source 1..23: mol_type = other RNA
  modified_base 7: mod_base = OTHER; note = thymine
tttacttggcaaccacaactcat

SEQ ID NO: 505 - RNA, 23 nt, synthetic construct
  source 1..23: mol_type = other RNA
  modified_base 7: mod_base = OTHER; note = thymine
ttttacttggcaaccacaactca

SEQ ID NO: 506 - RNA, 23 nt, synthetic construct
  source 1..23: mol_type = other RNA
tctttacttggcaaccacaactc

SEQ ID NO: 507 - RNA, 23 nt, synthetic construct
  source 1..23: mol_type = other RNA
  modified_base 5: mod_base = OTHER; note = thymine
tctttacttggcaaccacaactc

SEQ ID NO: 508 - RNA, 23 nt, synthetic construct
  source 1..23: mol_type = other RNA
tactttacttggcaaccacaact

SEQ ID NO: 509 - RNA, 23 nt, synthetic construct
  source 1..23: mol_type = other RNA
  modified_base 5: mod_base = OTHER; note = thymine
tactttacttggcaaccacaact

SEQ ID NO: 510 - RNA, 23 nt, synthetic construct
  source 1..23: mol_type = other RNA
  modified_base 7: mod_base = OTHER; note = thymine
taccactttacttggcaaccaca

SEQ ID NO: 511 - RNA, 23 nt, synthetic construct
  source 1..23: mol_type = other RNA
taccactttacttggcaaccaca

SEQ ID NO: 512 - RNA, 23 nt, synthetic construct
  source 1..23: mol_type = other RNA
  modified_base 7: mod_base = OTHER; note = thymine
  modified_base 12: mod_base = OTHER; note = thymine
taccactttacttggcaaccaca

SEQ ID NO: 513 - RNA, 23 nt, synthetic construct
  source 1..23: mol_type = other RNA
tcaccactttacttggcaaccac

SEQ ID NO: 514 - RNA, 23 nt, synthetic construct
  source 1..23: mol_type = other RNA
  modified_base 5: mod_base = OTHER; note = thymine
tagttcaccactttacttggcaa

SEQ ID NO: 515 - RNA, 23 nt, synthetic construct
  source 1..23: mol_type = other RNA
  modified_base 7: mod_base = OTHER; note = thymine
ttaagttcaccactttacttggc

SEQ ID NO: 516 - RNA, 23 nt, synthetic construct
  source 1..23: mol_type = other RNA
  modified_base 7: mod_base = OTHER; note = thymine
tgtaagttcaccactttacttgg

SEQ ID NO: 517 - RNA, 23 nt, synthetic construct
  source 1..23: mol_type = other RNA
tcgtaagttcaccactttacttg

SEQ ID NO: 518 - RNA, 23 nt, synthetic construct
  source 1..23: mol_type = other RNA
tacgtaagttcaccactttactt

SEQ ID NO: 519 - RNA, 23 nt, synthetic construct
  source 1..23: mol_type = other RNA
  modified_base 5: mod_base = OTHER; note = thymine
tacgtaagttcaccactttactt

SEQ ID NO: 520 - RNA, 23 nt, synthetic construct
  source 1..23: mol_type = other RNA
tcacgtaagttcaccactttact

SEQ ID NO: 521 - RNA, 23 nt, synthetic construct
  source 1..23: mol_type = other RNA
tccacgtaagttcaccactttac

SEQ ID NO: 522 - RNA, 23 nt, synthetic construct
  source 1..23: mol_type = other RNA
  modified_base 7: mod_base = OTHER; note = thymine
  modified_base 12: mod_base = OTHER; note = thymine
tccacgtaagttcaccactttac

SEQ ID NO: 523 - RNA, 23 nt, synthetic construct
  source 1..23: mol_type = other RNA
taccacgtaagttcaccacttta

SEQ ID NO: 524 - RNA, 23 nt, synthetic construct
  source 1..23: mol_type = other RNA
  modified_base 12: mod_base = OTHER; note = thymine
taccacgtaagttcaccacttta

SEQ ID NO: 525 - RNA, 23 nt, synthetic construct
  source 1..23: mol_type = other RNA
tcaccacgtaagttcaccacttt

SEQ ID NO: 526 - RNA, 23 nt, synthetic construct
  source 1..23: mol_type = other RNA
ttcaccacgtaagttcaccactt

SEQ ID NO: 527 - RNA, 23 nt, synthetic construct
  source 1..23: mol_type = other RNA
  modified_base 2: mod_base = OTHER; note = thymine
ttcaccacgtaagttcaccactt

SEQ ID NO: 528 - RNA, 23 nt, synthetic construct
  source 1..23: mol_type = other RNA
  modified_base 5: mod_base = OTHER; note = thymine
ttaatcaccacgtaagttcacca

SEQ ID NO: 529 - RNA, 23 nt, synthetic construct
  source 1..23: mol_type = other RNA
  modified_base 7: mod_base = OTHER; note = thymine
tattaatcaccacgtaagttcac

SEQ ID NO: 530 - RNA, 23 nt, synthetic construct
  source 1..23: mol_type = other RNA
tattaatcaccacgtaagttcac

SEQ ID NO: 531 - RNA, 23 nt, synthetic construct
  source 1..23: mol_type = other RNA
tcattaatcaccacgtaagttca

SEQ ID NO: 532 - RNA, 23 nt, synthetic construct
  source 1..23: mol_type = other RNA
  modified_base 5: mod_base = OTHER; note = thymine
tcattaatcaccacgtaagttca

SEQ ID NO: 533 - RNA, 23 nt, synthetic construct
  source 1..23: mol_type = other RNA
ttcattaatcaccacgtaagttc

SEQ ID NO: 534 - RNA, 23 nt, synthetic construct
  source 1..23: mol_type = other RNA
  modified_base 2: mod_base = OTHER; note = thymine
  modified_base 5: mod_base = OTHER; note = thymine
ttcattaatcaccacgtaagttc

SEQ ID NO: 535 - RNA, 23 nt, synthetic construct
  source 1..23: mol_type = other RNA
  modified_base 7: mod_base = OTHER; note = thymine
tttcattaatcaccacgtaagtt

SEQ ID NO: 536 - RNA, 23 nt, synthetic construct
  source 1..23: mol_type = other RNA
tttcattaatcaccacgtaagtt

SEQ ID NO: 537 - RNA, 23 nt, synthetic construct
  source 1..23: mol_type = other RNA
  modified_base 2: mod_base = OTHER; note = thymine
  modified_base 7: mod_base = OTHER; note = thymine
tttcattaatcaccacgtaagtt

SEQ ID NO: 538 - RNA, 23 nt, synthetic construct
  source 1..23: mol_type = other RNA
  modified_base 7: mod_base = OTHER; note = thymine
ttttcattaatcaccacgtaagt

SEQ ID NO: 539 - RNA, 23 nt, synthetic construct
  source 1..23: mol_type = other RNA
  modified_base 5: mod_base = OTHER; note = thymine
tatttcattaatcaccacgtaag

SEQ ID NO: 540 - RNA, 23 nt, synthetic construct
  source 1..23: mol_type = other RNA
  modified_base 7: mod_base = OTHER; note = thymine
tgataatttcattaatcaccacg

SEQ ID NO: 541 - RNA, 23 nt, synthetic construct
  source 1..23: mol_type = other RNA
tgataatttcattaatcaccacg

SEQ ID NO: 542 - RNA, 23 nt, synthetic construct
  source 1..23: mol_type = other RNA
  modified_base 7: mod_base = OTHER; note = thymine
  modified_base 12: mod_base = OTHER; note = thymine
tgataatttcattaatcaccacg

SEQ ID NO: 543 - RNA, 23 nt, synthetic construct
  source 1..23: mol_type = other RNA
  modified_base 5: mod_base = OTHER; note = thymine
tagctgcagcgggcccaaactca

SEQ ID NO: 544 - RNA, 23 nt, synthetic construct
  source 1..23: mol_type = other RNA
taggctgcagggttaccgccatc

SEQ ID NO: 545 - RNA, 23 nt, synthetic construct
  source 1..23: mol_type = other RNA
tgctgggtcactctgtctctgcg

SEQ ID NO: 546 - RNA, 23 nt, synthetic construct
  source 1..23: mol_type = other RNA
  modified_base 5: mod_base = OTHER; note = thymine
ttgctgggtcactctgtctctgc

SEQ ID NO: 547 - RNA, 23 nt, synthetic construct
  source 1..23: mol_type = other RNA
tttgctgggtcactctgtctctg

SEQ ID NO: 548 - RNA, 23 nt, synthetic construct
  source 1..23: mol_type = other RNA
  modified_base 5: mod_base = OTHER; note = thymine
tggttgctgggtcactctgtctc

SEQ ID NO: 549 - RNA, 23 nt, synthetic construct
  source 1..23: mol_type = other RNA
  modified_base 5: mod_base = OTHER; note = thymine
tgggttgctgggtcactctgtct

SEQ ID NO: 550 - RNA, 23 nt, synthetic construct
  source 1..23: mol_type = other RNA
ttctgggttgctgggtcactctg

SEQ ID NO: 551 - RNA, 23 nt, synthetic construct
  source 1..23: mol_type = other RNA
  modified_base 5: mod_base = OTHER; note = thymine
tctctgggttgctgggtcactct

SEQ ID NO: 552 - RNA, 23 nt, synthetic construct
  source 1..23: mol_type = other RNA
ttccctcatgggctctgggttgc

SEQ ID NO: 553 - RNA, 23 nt, synthetic construct
  source 1..23: mol_type = other RNA
ttgtccctcatgggctctgggtt

SEQ ID NO: 554 - RNA, 23 nt, synthetic construct
  source 1..23: mol_type = other RNA
  modified_base 5: mod_base = OTHER; note = thymine
tgtgtccctcatgggctctgggt

SEQ ID NO: 555 - RNA, 23 nt, synthetic construct
  source 1..23: mol_type = other RNA
tgaagacccaagtgagggagcgg

SEQ ID NO: 556 - RNA, 23 nt, synthetic construct
  source 1..23: mol_type = other RNA
tgggaagacccaagtgagggagc

SEQ ID NO: 557 - RNA, 23 nt, synthetic construct
  source 1..23: mol_type = other RNA
tacaagggaagacccaagtgagg

SEQ ID NO: 558 - RNA, 23 nt, synthetic construct
  source 1..23: mol_type = other RNA
tgaggacaagggaagacccaagt

SEQ ID NO: 559 - RNA, 23 nt, synthetic construct
  source 1..23: mol_type = other RNA
tgagaggacaagggaagacccaa

SEQ ID NO: 560 - RNA, 23 nt, synthetic construct
  source 1..23: mol_type = other RNA
tcgagaggacaagggaagaccca

SEQ ID NO: 561 - RNA, 23 nt, synthetic construct
  source 1..23: mol_type = other RNA
ttcggtgaattcaggacaggccc

SEQ ID NO: 562 - RNA, 23 nt, synthetic construct
  source 1..23: mol_type = other RNA
  modified_base 5: mod_base = OTHER; note = thymine
ttcttcgcatcctgcgaagggcg

SEQ ID NO: 563 - RNA, 23 nt, synthetic construct
  source 1..23: mol_type = other RNA
tgccctggtttctcgcaaataaa

SEQ ID NO: 564 - RNA, 23 nt, synthetic construct
  source 1..23: mol_type = other RNA
tgttctcttcacaacgcagttaa

SEQ ID NO: 565 - RNA, 23 nt, synthetic construct
  source 1..23: mol_type = other RNA
  modified_base 5: mod_base = OTHER; note = thymine
taagttctcttcacaacgcagtt

SEQ ID NO: 566 - RNA, 23 nt, synthetic construct
  source 1..23: mol_type = other RNA
ttccaagttctcttcacaacgca

SEQ ID NO: 567 - RNA, 23 nt, synthetic construct
  source 1..23: mol_type = other RNA
  modified_base 5: mod_base = OTHER; note = thymine
tggctcctccaagttctcttcac

SEQ ID NO: 568 - RNA, 23 nt, synthetic construct
  source 1..23: mol_type = other RNA
tcggctcctccaagttctcttca

SEQ ID NO: 569 - RNA, 23 nt, synthetic construct
  source 1..23: mol_type = other RNA
ttctcggctcctccaagttctct

SEQ ID NO: 570 - RNA, 23 nt, synthetic construct
  source 1..23: mol_type = other RNA
  modified_base 5: mod_base = OTHER; note = thymine
tatctcggctcctccaagttctc

SEQ ID NO: 571 - RNA, 23 nt, synthetic construct
  source 1..23: mol_type = other RNA
taatctcggctcctccaagttct

SEQ ID NO: 572 - RNA, 23 nt, synthetic construct
  source 1..23: mol_type = other RNA
tctgagcaaatctcggctcctcc

SEQ ID NO: 573 - RNA, 23 nt, synthetic construct
  source 1..23: mol_type = other RNA
tactgagcaaatctcggctcctc

SEQ ID NO: 574 - RNA, 23 nt, synthetic construct
  source 1..23: mol_type = other RNA
tgcactgagcaaatctcggctcc

SEQ ID NO: 575 - RNA, 23 nt, synthetic construct
  source 1..23: mol_type = other RNA
ttggcactgagcaaatctcggct

SEQ ID NO: 576 - RNA, 23 nt, synthetic construct
  source 1..23: mol_type = other RNA
tagtggcactgagcaaatctcgg

SEQ ID NO: 577 - RNA, 23 nt, synthetic construct
  source 1..23: mol_type = other RNA
  modified_base 5: mod_base = OTHER; note = thymine
taagtggcactgagcaaatctcg

SEQ ID NO: 578 - RNA, 23 nt, synthetic construct
  source 1..23: mol_type = other RNA
tgaagtggcactgagcaaatctc

SEQ ID NO: 579 - RNA, 23 nt, synthetic construct
  source 1..23: mol_type = other RNA
tgggaagtggcactgagcaaatc

SEQ ID NO: 580 - RNA, 23 nt, synthetic construct
  source 1..23: mol_type = other RNA
tagagggaagtggcactgagcaa

SEQ ID NO: 581 - RNA, 23 nt, synthetic construct
  source 1..23: mol_type = other RNA
taagagggaagtggcactgagca

SEQ ID NO: 582 - RNA, 23 nt, synthetic construct
  source 1..23: mol_type = other RNA
ttctcagactagaagagggaagt

SEQ ID NO: 583 - RNA, 23 nt, synthetic construct
  source 1..23: mol_type = other RNA
tcctctcagactagaagagggaa

SEQ ID NO: 584 - RNA, 23 nt, synthetic construct
  source 1..23: mol_type = other RNA
ttccctctcagactagaagaggg

SEQ ID NO: 585 - RNA, 23 nt, synthetic construct
  source 1..23: mol_type = other RNA
  modified_base 5: mod_base = OTHER; note = thymine
ttcttccctctcagactagaaga

SEQ ID NO: 586 - RNA, 23 nt, synthetic construct
  source 1..23: mol_type = other RNA
tgccctcttccctctcagactag

SEQ ID NO: 587 - RNA, 23 nt, synthetic construct
  source 1..23: mol_type = other RNA
ttctcccattggacgcgccctca

SEQ ID NO: 588 - RNA, 23 nt, synthetic construct
  source 1..23: mol_type = other RNA
  modified_base 5: mod_base = OTHER; note = thymine
tatctcccattggacgcgccctc

SEQ ID NO: 589 - RNA, 23 nt, synthetic construct
  source 1..23: mol_type = other RNA
taatctcccattggacgcgccct

SEQ ID NO: 590 - RNA, 23 nt, synthetic construct
  source 1..23: mol_type = other RNA
tgaaatctcccattggacgcgcc

SEQ ID NO: 591 - RNA, 23 nt, synthetic construct
  source 1..23: mol_type = other RNA
tagcctcaaatctcaggctgttt

SEQ ID NO: 592 - RNA, 23 nt, synthetic construct
  source 1..23: mol_type = other RNA
tagagcctcaaatctcaggctgt

SEQ ID NO: 593 - RNA, 23 nt, synthetic construct
  source 1..23: mol_type = other RNA
taagagcctcaaatctcaggctg

SEQ ID NO: 594 - RNA, 23 nt, synthetic construct
  source 1..23: mol_type = other RNA
tgaagagcctcaaatctcaggct

SEQ ID NO: 595 - RNA, 23 nt, synthetic construct
  source 1..23: mol_type = other RNA
ttgtaggaagagcctcaaatctc

SEQ ID NO: 596 - RNA, 23 nt, synthetic construct
  source 1..23: mol_type = other RNA
  modified_base 5: mod_base = OTHER; note = thymine
tatgtaggaagagcctcaaatct

SEQ ID NO: 597 - RNA, 23 nt, synthetic construct
  source 1..23: mol_type = other RNA
tgtcctgacaatgtaggaagagc

SEQ ID NO: 598 - RNA, 23 nt, synthetic construct
  source 1..23: mol_type = other RNA
  modified_base 5: mod_base = OTHER; note = thymine
tatgtcctgacaatgtaggaaga

SEQ ID NO: 599 - RNA, 23 nt, synthetic construct
  source 1..23: mol_type = other RNA
taatgtcctgacaatgtaggaag

SEQ ID NO: 600 - RNA, 23 nt, synthetic construct
  source 1..23: mol_type = other RNA
tgaaatgtcctgacaatgtagga

SEQ ID NO: 601 - RNA, 23 nt, synthetic construct
  source 1..23: mol_type = other RNA
tgtgatcatgaactaaatgaaat

SEQ ID NO: 602 - RNA, 23 nt, synthetic construct
  source 1..23: mol_type = other RNA
tactaccaccgtgatcatgaact

SEQ ID NO: 603 - RNA, 23 nt, synthetic construct
  source 1..23: mol_type = other RNA
  modified_base 5: mod_base = OTHER; note = thymine
ttactaccaccgtgatcatgaac

SEQ ID NO: 604 - RNA, 23 nt, synthetic construct
  source 1..23: mol_type = other RNA
  modified_base 5: mod_base = OTHER; note = thymine
ttgttactaccaccgtgatcatg

SEQ ID NO: 605 - RNA, 23 nt, synthetic construct
  source 1..23: mol_type = other RNA
tgatctcttaggtggtgcttaaa

SEQ ID NO: 606 - RNA, 23 nt, synthetic construct
  source 1..23: mol_type = other RNA
tgagcagatctcttaggtggtgc

SEQ ID NO: 607 - RNA, 23 nt, synthetic construct
  source 1..23: mol_type = other RNA
tatgagcagatctcttaggtggt

SEQ ID NO: 608 - RNA, 23 nt, synthetic construct
  source 1..23: mol_type = other RNA
tgatgagcagatctcttaggtgg

SEQ ID NO: 609 - RNA, 23 nt, synthetic construct
  source 1..23: mol_type = other RNA
ttagatgagcagatctcttaggt

SEQ ID NO: 610 - RNA, 23 nt, synthetic construct
  source 1..23: mol_type = other RNA
tttaggcttagatgagcagatct

SEQ ID NO: 611 - RNA, 23 nt, synthetic construct
  source 1..23: mol_type = other RNA
tctgcagaccaacttaggcttag

SEQ ID NO: 612 - RNA, 23 nt, synthetic construct
  source 1..23: mol_type = other RNA
  modified_base 5: mod_base = OTHER; note = thymine
tgcctgcagaccaacttaggctt

SEQ ID NO: 613 - RNA, 23 nt, synthetic construct
  source 1..23: mol_type = other RNA
  modified_base 5: mod_base = OTHER; note = thymine
ttcattcaaacgcctgcagacca

SEQ ID NO: 614 - RNA, 23 nt, synthetic construct
  source 1..23: mol_type = other RNA
tcttggcaaccacaactcattca

SEQ ID NO: 615 - RNA, 23 nt, synthetic construct
  source 1..23: mol_type = other RNA
  modified_base 5: mod_base = OTHER; note = thymine
tacttggcaaccacaactcattc

SEQ ID NO: 616 - RNA, 23 nt, synthetic construct
  source 1..23: mol_type = other RNA
  modified_base 5: mod_base = OTHER; note = thymine
ttacttggcaaccacaactcatt

SEQ ID NO: 617 - RNA, 23 nt, synthetic construct
  source 1..23: mol_type = other RNA
tttcaccactttacttggcaacc

SEQ ID NO: 618 - RNA, 23 nt, synthetic construct
  source 1..23: mol_type = other RNA
tgttcaccactttacttggcaac

SEQ ID NO: 619 - RNA, 23 nt, synthetic construct
  source 1..23: mol_type = other RNA
  modified_base 5: mod_base = OTHER; note = thymine
taagttcaccactttacttggca

SEQ ID NO: 620 - RNA, 23 nt, synthetic construct
  source 1..23: mol_type = other RNA
tatcaccacgtaagttcaccact

SEQ ID NO: 621 - RNA, 23 nt, synthetic construct
  source 1..23: mol_type = other RNA
tttaatcaccacgtaagttcacc

SEQ ID NO: 622 - RNA, 23 nt, synthetic construct
  source 1..23: mol_type = other RNA
  modified_base 5: mod_base = OTHER; note = thymine
taatttcattaatcaccacgtaa

SEQ ID NO: 623 - RNA, 21 nt, synthetic construct
  source 1..21: mol_type = other RNA
  modified_base 1: mod_base = OTHER; note = 2'-O-methylguanosine-3'- phosphorothioate
  modified_base 2: mod_base = OTHER; note = 2'-O-methylguanosine-3'- phosphorothioate
  modified_base 3: mod_base = OTHER; note = 2'-O-methylcytidine-3'-phosphate
  modified_base 4: mod_base = OTHER; note = 2'-O-methylguanosine-3'-phosphate
  modified_base 5: mod_base = OTHER; note = 2'-O-methylguanosine-3'-phosphate
  modified_base 6: mod_base = OTHER; note = 2'-O-hexadecyl-uridine-3'-phosphate
  modified_base 7: mod_base = OTHER; note = 2'-fluoroadenosine-3'-phosphate
  modified_base 8: mod_base = OTHER; note = 2'-O-methyladenosine-3'-phosphate
  modified_base 9: mod_base = OTHER; note = 2'-fluorocytidine-3'-phosphate
  modified_base 10: mod_base = OTHER; note = 2'-fluorocytidine-3'-phosphate
  modified_base 11: mod_base = OTHER; note = 2'-fluorocytidine-3'-phosphate
  modified_base 12: mod_base = OTHER; note = 2'-O-methyluridine-3'-phosphate
  modified_base 13: mod_base = OTHER; note = 2'-O-methylguanosine-3'-phosphate
  modified_base 14: mod_base = OTHER; note = 2'-O-methylcytidine-3'-phosphate
  modified_base 15: mod_base = OTHER; note = 2'-O-methyladenosine-3'-phosphate
  modified_base 16: mod_base = OTHER; note = 2'-O-methylguanosine-3'-phosphate
  modified_base 17: mod_base = OTHER; note = 2'-O-methylcytidine-3'-phosphate
  modified_base 18: mod_base = OTHER; note = 2'-O-methylcytidine-3'-phosphate
  modified_base 19: mod_base = OTHER; note = 2'-O-methyluridine-3'-phosphate
  modified_base 20: mod_base = OTHER; note = 2'-O-methylguanosine-3'-phosphate
  modified_base 21: mod_base = OTHER; note = 2'-O-methyladenosine-3'-phosphate N-[tris(GalNAc-alkyl)-amidodecanoyl)]-4-hydroxyprolinol Hyp-(GalNAc-alkyl)3 (2S,4R)-1-[29-[[2-(acetylamino)-2-deoxy-beta-D-galactopyran osyl]oxy]-14,14-bis[[3-[[3-[[5-[[2-(acetylamino)-2-deoxy-be ta-D-galactopyranosyl]oxy]-1-oxopentyl]amino]propyl]amino]- 3-oxopropoxy]methyl]-1,12,19,25-tetraoxo-16-oxa-13,20,24-tr iazanonacos-1-yl]-4-hydroxy-2-hydroxymethylpyrrolidine
ggcggtaaccctgcagcctga

SEQ ID NO: 624 - RNA, 21 nt, synthetic construct
  source 1..21: mol_type = other RNA
  modified_base 1: mod_base = OTHER; note = 2'-O-methylguanosine-3'- phosphorothioate
  modified_base 2: mod_base = OTHER; note = 2'-O-methylcytidine-3'- phosphorothioate
  modified_base 3: mod_base = OTHER; note = 2'-O-methyladenosine-3'-phosphate
  modified_base 4: mod_base = OTHER; note = 2'-O-methylguanosine-3'-phosphate
  modified_base 5: mod_base = OTHER; note = 2'-O-methyladenosine-3'-phosphate
  modified_base 6: mod_base = OTHER; note = 2'-O-hexadecyl-guanosine-3'-phosphate
  modified_base 7: mod_base = OTHER; note = 2'-fluoroadenosine-3'-phosphate
  modified_base 8: mod_base = OTHER; note = 2'-O-methylcytidine-3'-phosphate
  modified_base 9: mod_base = OTHER; note = 2'-fluoroadenosine-3'-phosphate
  modified_base 10: mod_base = OTHER; note = 2'-fluoroguanosine-3'-phosphate
  modified_base 11: mod_base = OTHER; note = 2'-fluoroadenosine-3'-phosphate
  modified_base 12: mod_base = OTHER; note = 2'-O-methylguanosine-3'-phosphate
  modified_base 13: mod_base = OTHER; note = 2'-O-methyluridine-3'-phosphate
  modified_base 14: mod_base = OTHER; note = 2'-O-methylguanosine-3'-phosphate
  modified_base 15: mod_base = OTHER; note = 2'-O-methyladenosine-3'-phosphate
  modified_base 16: mod_base = OTHER; note = 2'-O-methylcytidine-3'-phosphate
  modified_base 17: mod_base = OTHER; note = 2'-O-methylcytidine-3'-phosphate
  modified_base 18: mod_base = OTHER; note = 2'-O-methylcytidine-3'-phosphate
  modified_base 19: mod_base = OTHER; note = 2'-O-methyladenosine-3'-phosphate
  modified_base 20: mod_base = OTHER; note = 2'-O-methylguanosine-3'-phosphate
  modified_base 21: mod_base = OTHER; note = 2'-O-methyladenosine-3'-phosphate N-[tris(GalNAc-alkyl)-amidodecanoyl)]-4-hydroxyprolinol Hyp-(GalNAc-alkyl)3 (2S,4R)-1-[29-[[2-(acetylamino)-2-deoxy-beta-D-galactopyran osyl]oxy]-14,14-bis[[3-[[3-[[5-[[2-(acetylamino)-2-deoxy-be ta-D-galactopyranosyl]oxy]-1-oxopentyl]amino]propyl]amino]- 3-oxopropoxy]methyl]-1,12,19,25-tetraoxo-16-oxa-13,20,24-tr iazanonacos-1-yl]-4-hydroxy-2-hydroxymethylpyrrolidine
gcagagacagagtgacccaga

SEQ ID NO: 625 - RNA, 21 nt, synthetic construct
  source 1..21: mol_type = other RNA
  modified_base 1: mod_base = OTHER; note = 2'-O-methyladenosine-3'- phosphorothioate
  modified_base 2: mod_base = OTHER; note = 2'-O-methylguanosine-3'- phosphorothioate
  modified_base 3: mod_base = OTHER; note = 2'-O-methyladenosine-3'-phosphate
  modified_base 4: mod_base = OTHER; note = 2'-O-methylcytidine-3'-phosphate
  modified_base 5: mod_base = OTHER; note = 2'-O-methyladenosine-3'-phosphate
  modified_base 6: mod_base = OTHER; note = 2'-O-hexadecyl-guanosine-3'-phosphate
  modified_base 7: mod_base = OTHER; note = 2'-fluoroadenosine-3'-phosphate
  modified_base 8: mod_base = OTHER; note = 2'-O-methylguanosine-3'-phosphate
  modified_base 9: mod_base = OTHER; note = 2'-fluorouridine-3'-phosphate
  modified_base 10: mod_base = OTHER; note = 2'-fluoroguanosine-3'-phosphate
  modified_base 11: mod_base = OTHER; note = 2'-fluoroadenosine-3'-phosphate
  modified_base 12: mod_base = OTHER; note = 2'-O-methylcytidine-3'-phosphate
  modified_base 13: mod_base = OTHER; note = 2'-O-methylcytidine-3'-phosphate
  modified_base 14: mod_base = OTHER; note = 2'-O-methylcytidine-3'-phosphate
  modified_base 15: mod_base = OTHER; note = 2'-O-methyladenosine-3'-phosphate
  modified_base 16: mod_base = OTHER; note = 2'-O-methylguanosine-3'-phosphate
  modified_base 17: mod_base = OTHER; note = 2'-O-methylcytidine-3'-phosphate
  modified_base 18: mod_base = OTHER; note = 2'-O-methyladenosine-3'-phosphate
  modified_base 19: mod_base = OTHER; note = 2'-O-methyladenosine-3'-phosphate
  modified_base 20: mod_base = OTHER; note = 2'-O-methylcytidine-3'-phosphate
  modified_base 21: mod_base = OTHER; note = 2'-O-methyladenosine-3'-phosphate N-[tris(GalNAc-alkyl)-amidodecanoyl)]-4-hydroxyprolinol Hyp-(GalNAc-alkyl)3 (2S,4R)-1-[29-[[2-(acetylamino)-2-deoxy-beta-D-galactopyran osyl]oxy]-14,14-bis[[3-[[3-[[5-[[2-(acetylamino)-2-deoxy-be ta-D-galactopyranosyl]oxy]-1-oxopentyl]amino]propyl]amino]- 3-oxopropoxy]methyl]-1,12,19,25-tetraoxo-16-oxa-13,20,24-tr iazanonacos-1-yl]-4-hydroxy-2-hydroxymethylpyrrolidine
agacagagtgacccagcaaca

SEQ ID NO: 626 - RNA, 21 nt, synthetic construct
  source 1..21: mol_type = other RNA
  modified_base 1: mod_base = OTHER; note = 2'-O-methylcytidine-3'- phosphorothioate
  modified_base 2: mod_base = OTHER; note = 2'-O-methyladenosine-3'- phosphorothioate
  modified_base 3: mod_base = OTHER; note = 2'-O-methylguanosine-3'-phosphate
  modified_base 4: mod_base = OTHER; note = 2'-O-methyladenosine-3'-phosphate
  modified_base 5: mod_base = OTHER; note = 2'-O-methylguanosine-3'-phosphate
  modified_base 6: mod_base = OTHER; note = 2'-O-hexadecyl-uridine-3'-phosphate
  modified_base 7: mod_base = OTHER; note = 2'-fluoroguanosine-3'-phosphate
  modified_base 8: mod_base = OTHER; note = 2'-O-methyladenosine-3'-phosphate
  modified_base 9: mod_base = OTHER; note = 2'-fluorocytidine-3'-phosphate
  modified_base 10: mod_base = OTHER; note = 2'-fluorocytidine-3'-phosphate
  modified_base 11: mod_base = OTHER; note = 2'-fluorocytidine-3'-phosphate
  modified_base 12: mod_base = OTHER; note = 2'-O-methyladenosine-3'-phosphate
  modified_base 13: mod_base = OTHER; note = 2'-O-methylguanosine-3'-phosphate
  modified_base 14: mod_base = OTHER; note = 2'-O-methylcytidine-3'-phosphate
  modified_base 15: mod_base = OTHER; note = 2'-O-methyladenosine-3'-phosphate
  modified_base 16: mod_base = OTHER; note = 2'-O-methyladenosine-3'-phosphate
  modified_base 17: mod_base = OTHER; note = 2'-O-methylcytidine-3'-phosphate
  modified_base 18: mod_base = OTHER; note = 2'-O-methylcytidine-3'-phosphate
  modified_base 19: mod_base = OTHER; note = 2'-O-methylcytidine-3'-phosphate
  modified_base 20: mod_base = OTHER; note = 2'-O-methyladenosine-3'-phosphate
  modified_base 21: mod_base = OTHER; note = 2'-O-methyladenosine-3'-phosphate N-[tris(GalNAc-alkyl)-amidodecanoyl)]-4-hydroxyprolinol Hyp-(GalNAc-alkyl)3 (2S,4R)-1-[29-[[2-(acetylamino)-2-deoxy-beta-D-galactopyran osyl]oxy]-14,14-bis[[3-[[3-[[5-[[2-(acetylamino)-2-deoxy-be ta-D-galactopyranosyl]oxy]-1-oxopentyl]amino]propyl]amino]- 3-oxopropoxy]methyl]-1,12,19,25-tetraoxo-16-oxa-13,20,24-tr iazanonacos-1-yl]-4-hydroxy-2-hydroxymethylpyrrolidine
cagagtgacccagcaacccaa

SEQ ID NO: 627 - RNA, 21 nt, synthetic construct
  source 1..21: mol_type = other RNA
  modified_base 1: mod_base = OTHER; note = 2'-O-methyladenosine-3'- phosphorothioate
  modified_base 2: mod_base = OTHER; note = 2'-O-methylguanosine-3'- phosphorothioate
  modified_base 3: mod_base = OTHER; note = 2'-O-methyladenosine-3'-phosphate
  modified_base 4: mod_base = OTHER; note = 2'-O-methylguanosine-3'-phosphate
  modified_base 5: mod_base = OTHER; note = 2'-O-methyluridine-3'-phosphate
  modified_base 6: mod_base = OTHER; note = 2'-O-hexadecyl-guanosine-3'-phosphate
  modified_base 7: mod_base = OTHER; note = 2'-fluoroadenosine-3'-phosphate
  modified_base 8: mod_base = OTHER; note = 2'-O-methylcytidine-3'-phosphate
  modified_base 9: mod_base = OTHER; note = 2'-fluorocytidine-3'-phosphate
  modified_base 10: mod_base = OTHER; note = 2'-fluorocytidine-3'-phosphate
  modified_base 11: mod_base = OTHER; note = 2'-fluoroadenosine-3'-phosphate
  modified_base 12: mod_base = OTHER; note = 2'-O-methylguanosine-3'-phosphate
  modified_base 13: mod_base = OTHER; note = 2'-O-methylcytidine-3'-phosphate
  modified_base 14: mod_base = OTHER; note = 2'-O-methyladenosine-3'-phosphate
  modified_base 15: mod_base = OTHER; note = 2'-O-methyladenosine-3'-phosphate
  modified_base 16: mod_base = OTHER; note = 2'-O-methylcytidine-3'-phosphate
  modified_base 17: mod_base = OTHER; note = 2'-O-methylcytidine-3'-phosphate
  modified_base 18: mod_base = OTHER; note = 2'-O-methylcytidine-3'-phosphate
  modified_base 19: mod_base = OTHER; note = 2'-O-methyladenosine-3'-phosphate
  modified_base 20: mod_base = OTHER; note = 2'-O-methylguanosine-3'-phosphate
  modified_base 21: mod_base = OTHER; note = 2'-O-methyladenosine-3'-phosphate N-[tris(GalNAc-alkyl)-amidodecanoyl)]-4-hydroxyprolinol Hyp-(GalNAc-alkyl)3 (2S,4R)-1-[29-[[2-(acetylamino)-2-deoxy-beta-D-galactopyran osyl]oxy]-14,14-bis[[3-[[3-[[5-[[2-(acetylamino)-2-deoxy-be ta-D-galactopyranosyl]oxy]-1-oxopentyl]amino]propyl]amino]- 3-oxopropoxy]methyl]-1,12,19,25-tetraoxo-16-oxa-13,20,24-tr iazanonacos-1-yl]-4-hydroxy-2-hydroxymethylpyrrolidine
agagtgacccagcaacccaga

SEQ ID NO: 628 - RNA, 21 nt, synthetic construct
  source 1..21: mol_type = other RNA
  modified_base 1: mod_base = OTHER; note = 2'-O-methyladenosine-3'- phosphorothioate
  modified_base 2: mod_base = OTHER; note = 2'-O-methylguanosine-3'- phosphorothioate
  modified_base 3: mod_base = OTHER; note = 2'-O-methylcytidine-3'-phosphate
  modified_base 4: mod_base = OTHER; note = 2'-O-methyladenosine-3'-phosphate
  modified_base 5: mod_base = OTHER; note = 2'-O-methyladenosine-3'-phosphate
  modified_base 6: mod_base = OTHER; note = 2'-O-hexadecyl-cytidine-3'-phosphate
  modified_base 7: mod_base = OTHER; note = 2'-fluorocytidine-3'-phosphate
  modified_base 8: mod_base = OTHER; note = 2'-O-methylcytidine-3'-phosphate
  modified_base 9: mod_base = OTHER; note = 2'-fluoroadenosine-3'-phosphate
  modified_base 10: mod_base = OTHER; note = 2'-fluoroguanosine-3'-phosphate
  modified_base 11: mod_base = OTHER; note = 2'-fluoroadenosine-3'-phosphate
  modified_base 12: mod_base = OTHER; note = 2'-O-methylguanosine-3'-phosphate
  modified_base 13: mod_base = OTHER; note = 2'-O-methylcytidine-3'-phosphate
  modified_base 14: mod_base = OTHER; note = 2'-O-methylcytidine-3'-phosphate
  modified_base 15: mod_base = OTHER; note = 2'-O-methylcytidine-3'-phosphate
  modified_base 16: mod_base = OTHER; note = 2'-O-methyladenosine-3'-phosphate
  modified_base 17: mod_base = OTHER; note = 2'-O-methyluridine-3'-phosphate
  modified_base 18: mod_base = OTHER; note = 2'-O-methylguanosine-3'-phosphate
  modified_base 19: mod_base = OTHER; note = 2'-O-methyladenosine-3'-phosphate
  modified_base 20: mod_base = OTHER; note = 2'-O-methylguanosine-3'-phosphate
  modified_base 21: mod_base = OTHER; note = 2'-O-methyladenosine-3'-phosphate N-[tris(GalNAc-alkyl)-amidodecanoyl)]-4-hydroxyprolinol Hyp-(GalNAc-alkyl)3 (2S,4R)-1-[29-[[2-(acetylamino)-2-deoxy-beta-D-galactopyran osyl]oxy]-14,14-bis[[3-[[3-[[5-[[2-(acetylamino)-2-deoxy-be ta-D-galactopyranosyl]oxy]-1-oxopentyl]amino]propyl]amino]- 3-oxopropoxy]methyl]-1,12,19,25-tetraoxo-16-oxa-13,20,24-tr iazanonacos-1-yl]-4-hydroxy-2-hydroxymethylpyrrolidine
agcaacccagagcccatgaga

SEQ ID NO: 629 - RNA, 21 nt, synthetic construct
  source 1..21: mol_type = other RNA
  modified_base 1: mod_base = OTHER; note = 2'-O-methyladenosine-3'- phosphorothioate
  modified_base 2: mod_base = OTHER; note = 2'-O-methylguanosine-3'- phosphorothioate
  modified_base 3: mod_base = OTHER; note = 2'-O-methylcytidine-3'-phosphate
  modified_base 4: mod_base = OTHER; note = 2'-O-methyladenosine-3'-phosphate
  modified_base 5: mod_base = OTHER; note = 2'-O-methyladenosine-3'-phosphate
  modified_base 6: mod_base = OTHER; note = 2'-O-hexadecyl-cytidine-3'-phosphate
  modified_base 7: mod_base = OTHER; note = 2'-O-methylcytidine-3'-phosphate
  modified_base 8: mod_base = OTHER; note = 2'-O-methylcytidine-3'-phosphate
  modified_base 9: mod_base = OTHER; note = 2'-fluoroadenosine-3'-phosphate
  modified_base 10: mod_base = OTHER; note = 2'-fluoroguanosine-3'-phosphate
  modified_base 11: mod_base = OTHER; note = 2'-fluoroadenosine-3'-phosphate
  modified_base 12: mod_base = OTHER; note = 2'-O-methylguanosine-3'-phosphate
  modified_base 13: mod_base = OTHER; note = 2'-O-methylcytidine-3'-phosphate
  modified_base 14: mod_base = OTHER; note = 2'-O-methylcytidine-3'-phosphate
  modified_base 15: mod_base = OTHER; note = 2'-O-methylcytidine-3'-phosphate
  modified_base 16: mod_base = OTHER; note = 2'-O-methyladenosine-3'-phosphate
  modified_base 17: mod_base = OTHER; note = 2'-O-methyluridine-3'-phosphate
  modified_base 18: mod_base = OTHER; note = 2'-O-methylguanosine-3'-phosphate
  modified_base 19: mod_base = OTHER; note = 2'-O-methyladenosine-3'-phosphate
  modified_base 20: mod_base = OTHER; note = 2'-O-methylguanosine-3'-phosphate
  modified_base 21: mod_base = OTHER; note = 2'-O-methyladenosine-3'-phosphate N-[tris(GalNAc-alkyl)-amidodecanoyl)]-4-hydroxyprolinol Hyp-(GalNAc-alkyl)3 (2S,4R)-1-[29-[[2-(acetylamino)-2-deoxy-beta-D-galactopyran osyl]oxy]-14,14-bis[[3-[[3-[[5-[[2-(acetylamino)-2-deoxy-be ta-D-galactopyranosyl]oxy]-1-oxopentyl]amino]propyl]amino]- 3-oxopropoxy]methyl]-1,12,19,25-tetraoxo-16-oxa-13,20,24-tr iazanonacos-1-yl]-4-hydroxy-2-hydroxymethylpyrrolidine
agcaacccagagcccatgaga

SEQ ID NO: 630 - RNA, 21 nt, synthetic construct
  source 1..21: mol_type = other RNA
  modified_base 1: mod_base = OTHER; note = 2'-O-methylguanosine-3'- phosphorothioate
  modified_base 2: mod_base = OTHER; note = 2'-O-methylcytidine-3'- phosphorothioate
  modified_base 3: mod_base = OTHER; note = 2'-O-methyladenosine-3'-phosphate
  modified_base 4: mod_base = OTHER; note = 2'-O-methyladenosine-3'-phosphate
  modified_base 5: mod_base = OTHER; note = 2'-O-methylcytidine-3'-phosphate
  modified_base 6: mod_base = OTHER; note = 2'-O-hexadecyl-cytidine-3'-phosphate
  modified_base 7: mod_base = OTHER; note = 2'-fluorocytidine-3'-phosphate
  modified_base 8: mod_base = OTHER; note = 2'-O-methyladenosine-3'-phosphate
  modified_base 9: mod_base = OTHER; note = 2'-fluoroguanosine-3'-phosphate
  modified_base 10: mod_base = OTHER; note = 2'-fluoroadenosine-3'-phosphate
  modified_base 11: mod_base = OTHER; note = 2'-fluoroguanosine-3'-phosphate
  modified_base 12: mod_base = OTHER; note = 2'-O-methylcytidine-3'-phosphate
  modified_base 13: mod_base = OTHER; note = 2'-O-methylcytidine-3'-phosphate
  modified_base 14: mod_base = OTHER; note = 2'-O-methylcytidine-3'-phosphate
  modified_base 15: mod_base = OTHER; note = 2'-O-methyladenosine-3'-phosphate
  modified_base 16: mod_base = OTHER; note = 2'-O-methyluridine-3'-phosphate
  modified_base 17: mod_base = OTHER; note = 2'-O-methylguanosine-3'-phosphate
  modified_base 18: mod_base = OTHER; note = 2'-O-methyladenosine-3'-phosphate
  modified_base 19: mod_base = OTHER; note = 2'-O-methylguanosine-3'-phosphate
  modified_base 20: mod_base = OTHER; note = 2'-O-methylguanosine-3'-phosphate
  modified_base 21: mod_base = OTHER; note = 2'-O-methyladenosine-3'-phosphate N-[tris(GalNAc-alkyl)-amidodecanoyl)]-4-hydroxyprolinol Hyp-(GalNAc-alkyl)3 (2S,4R)-1-[29-[[2-(acetylamino)-2-deoxy-beta-D-galactopyran osyl]oxy]-14,14-bis[[3-[[3-[[5-[[2-(acetylamino)-2-deoxy-be ta-D-galactopyranosyl]oxy]-1-oxopentyl]amino]propyl]amino]- 3-oxopropoxy]methyl]-1,12,19,25-tetraoxo-16-oxa-13,20,24-tr iazanonacos-1-yl]-4-hydroxy-2-hydroxymethylpyrrolidine
gcaacccagagcccatgagga

SEQ ID NO: 631 - RNA, 21 nt, synthetic construct
  source 1..21: mol_type = other RNA
  modified_base 1: mod_base = OTHER; note = 2'-O-methylguanosine-3'- phosphorothioate
  modified_base 2: mod_base = OTHER; note = 2'-O-methylcytidine-3'- phosphorothioate
  modified_base 3: mod_base = OTHER; note = 2'-O-methyladenosine-3'-phosphate
  modified_base 4: mod_base = OTHER; note = 2'-O-methyladenosine-3'-phosphate
  modified_base 5: mod_base = OTHER; note = 2'-O-methylcytidine-3'-phosphate
  modified_base 6: mod_base = OTHER; note = 2'-O-hexadecyl-cytidine-3'-phosphate
  modified_base 7: mod_base = OTHER; note = 2'-O-methylcytidine-3'-phosphate
  modified_base 8: mod_base = OTHER; note = 2'-O-methyladenosine-3'-phosphate
  modified_base 9: mod_base = OTHER; note = 2'-fluoroguanosine-3'-phosphate
  modified_base 10: mod_base = OTHER; note = 2'-fluoroadenosine-3'-phosphate
  modified_base 11: mod_base = OTHER; note = 2'-fluoroguanosine-3'-phosphate
  modified_base 12: mod_base = OTHER; note = 2'-O-methylcytidine-3'-phosphate
  modified_base 13: mod_base = OTHER; note = 2'-O-methylcytidine-3'-phosphate
  modified_base 14: mod_base = OTHER; note = 2'-O-methylcytidine-3'-phosphate
  modified_base 15: mod_base = OTHER; note = 2'-O-methyladenosine-3'-phosphate
  modified_base 16: mod_base = OTHER; note = 2'-O-methyluridine-3'-phosphate
  modified_base 17: mod_base = OTHER; note = 2'-O-methylguanosine-3'-phosphate
  modified_base 18: mod_base = OTHER; note = 2'-O-methyladenosine-3'-phosphate
  modified_base 19: mod_base = OTHER; note = 2'-O-methylguanosine-3'-phosphate
  modified_base 20: mod_base = OTHER; note = 2'-O-methylguanosine-3'-phosphate
  modified_base 21: mod_base = OTHER; note = 2'-O-methyladenosine-3'-phosphate N-[tris(GalNAc-alkyl)-amidodecanoyl)]-4-hydroxyprolinol Hyp-(GalNAc-alkyl)3 (2S,4R)-1-[29-[[2-(acetylamino)-2-deoxy-beta-D-galactopyran osyl]oxy]-14,14-bis[[3-[[3-[[5-[[2-(acetylamino)-2-deoxy-be ta-D-galactopyranosyl]oxy]-1-oxopentyl]amino]propyl]amino]- 3-oxopropoxy]methyl]-1,12,19,25-tetraoxo-16-oxa-13,20,24-tr iazanonacos-1-yl]-4-hydroxy-2-hydroxymethylpyrrolidine
gcaacccagagcccatgagga

SEQ ID NO: 632 - RNA, 21 nt, synthetic construct
  source 1..21: mol_type = other RNA
  modified_base 1: mod_base = OTHER; note = 2'-O-methylcytidine-3'- phosphorothioate
  modified_base 2: mod_base = OTHER; note = 2'-O-methyladenosine-3'- phosphorothioate
  modified_base 3: mod_base = OTHER; note = 2'-O-methyladenosine-3'-phosphate
  modified_base 4: mod_base = OTHER; note = 2'-O-methylcytidine-3'-phosphate
  modified_base 5: mod_base = OTHER; note = 2'-O-methylcytidine-3'-phosphate
  modified_base 6: mod_base = OTHER; note = 2'-O-hexadecyl-cytidine-3'-phosphate
  modified_base 7: mod_base = OTHER; note = 2'-fluoroadenosine-3'-phosphate
  modified_base 8: mod_base = OTHER; note = 2'-O-methylguanosine-3'-phosphate
  modified_base 9: mod_base = OTHER; note = 2'-fluoroadenosine-3'-phosphate
  modified_base 10: mod_base = OTHER; note = 2'-fluoroguanosine-3'-phosphate
  modified_base 11: mod_base = OTHER; note = 2'-fluorocytidine-3'-phosphate
  modified_base 12: mod_base = OTHER; note = 2'-O-methylcytidine-3'-phosphate
  modified_base 13: mod_base = OTHER; note = 2'-O-methylcytidine-3'-phosphate
  modified_base 14: mod_base = OTHER; note = 2'-O-methyladenosine-3'-phosphate
  modified_base 15: mod_base = OTHER; note = 2'-O-methyluridine-3'-phosphate
  modified_base 16: mod_base = OTHER; note = 2'-O-methylguanosine-3'-phosphate
  modified_base 17: mod_base = OTHER; note = 2'-O-methyladenosine-3'-phosphate
  modified_base 18: mod_base = OTHER; note = 2'-O-methylguanosine-3'-phosphate
  modified_base 19: mod_base = OTHER; note = 2'-O-methylguanosine-3'-phosphate
  modified_base 20: mod_base = OTHER; note = 2'-O-methylguanosine-3'-phosphate
  modified_base 21: mod_base = OTHER; note = 2'-O-methyladenosine-3'-phosphate N-[tris(GalNAc-alkyl)-amidodecanoyl)]-4-hydroxyprolinol Hyp-(GalNAc-alkyl)3 (2S,4R)-1-[29-[[2-(acetylamino)-2-deoxy-beta-D-galactopyran osyl]oxy]-14,14-bis[[3-[[3-[[5-[[2-(acetylamino)-2-deoxy-be ta-D-galactopyranosyl]oxy]-1-oxopentyl]amino]propyl]amino]- 3-oxopropoxy]methyl]-1,12,19,25-tetraoxo-16-oxa-13,20,24-tr iazanonacos-1-yl]-4-hydroxy-2-hydroxymethylpyrrolidine
caacccagagcccatgaggga

SEQ ID NO: 633 - RNA, 21 nt, synthetic construct
  source 1..21: mol_type = other RNA
  modified_base 1: mod_base = OTHER; note = 2'-O-methylcytidine-3'- phosphorothioate
  modified_base 2: mod_base = OTHER; note = 2'-O-methyladenosine-3'- phosphorothioate
  modified_base 3: mod_base = OTHER; note = 2'-O-methyladenosine-3'-phosphate
  modified_base 4: mod_base = OTHER; note = 2'-O-methylcytidine-3'-phosphate
  modified_base 5: mod_base = OTHER; note = 2'-O-methylcytidine-3'-phosphate
  modified_base 6: mod_base = OTHER; note = 2'-O-hexadecyl-cytidine-3'-phosphate
  modified_base 7: mod_base = OTHER; note = 2'-O-methyladenosine-3'-phosphate
  modified_base 8: mod_base = OTHER; note = 2'-O-methylguanosine-3'-phosphate
  modified_base 9: mod_base = OTHER; note = 2'-fluoroadenosine-3'-phosphate
  modified_base 10: mod_base = OTHER; note = 2'-fluoroguanosine-3'-phosphate
  modified_base 11: mod_base = OTHER; note = 2'-fluorocytidine-3'-phosphate
  modified_base 12: mod_base = OTHER; note = 2'-O-methylcytidine-3'-phosphate
  modified_base 13: mod_base = OTHER; note = 2'-O-methylcytidine-3'-phosphate
  modified_base 14: mod_base = OTHER; note = 2'-O-methyladenosine-3'-phosphate
  modified_base 15: mod_base = OTHER; note = 2'-O-methyluridine-3'-phosphate
  modified_base 16: mod_base = OTHER; note = 2'-O-methylguanosine-3'-phosphate
  modified_base 17: mod_base = OTHER; note = 2'-O-methyladenosine-3'-phosphate
  modified_base 18: mod_base = OTHER; note = 2'-O-methylguanosine-3'-phosphate
  modified_base 19: mod_base = OTHER; note = 2'-O-methylguanosine-3'-phosphate
  modified_base 20: mod_base = OTHER; note = 2'-O-methylguanosine-3'-phosphate
  modified_base 21: mod_base = OTHER; note = 2'-O-methyladenosine-3'-phosphate N-[tris(GalNAc-alkyl)-amidodecanoyl)]-4-hydroxyprolinol Hyp-(GalNAc-alkyl)3 (2S,4R)-1-[29-[[2-(acetylamino)-2-deoxy-beta-D-galactopyran osyl]oxy]-14,14-bis[[3-[[3-[[5-[[2-(acetylamino)-2-deoxy-be ta-D-galactopyranosyl]oxy]-1-oxopentyl]amino]propyl]amino]- 3-oxopropoxy]methyl]-1,12,19,25-tetraoxo-16-oxa-13,20,24-tr iazanonacos-1-yl]-4-hydroxy-2-hydroxymethylpyrrolidine
caacccagagcccatgaggga

SEQ ID NO: 634 - RNA, 21 nt, synthetic construct
  source 1..21: mol_type = other RNA
  modified_base 1: mod_base = OTHER; note = 2'-O-methyladenosine-3'- phosphorothioate
  modified_base 2: mod_base = OTHER; note = 2'-O-methylcytidine-3'- phosphorothioate
  modified_base 3: mod_base = OTHER; note = 2'-O-methylcytidine-3'-phosphate
  modified_base 4: mod_base = OTHER; note = 2'-O-methylcytidine-3'-phosphate
  modified_base 5: mod_base = OTHER; note = 2'-O-methyladenosine-3'-phosphate
  modified_base 6: mod_base = OTHER; note = 2'-O-hexadecyl-guanosine-3'-phosphate
  modified_base 7: mod_base = OTHER; note = 2'-fluoroadenosine-3'-phosphate
  modified_base 8: mod_base = OTHER; note = 2'-O-methylguanosine-3'-phosphate
  modified_base 9: mod_base = OTHER; note = 2'-fluorocytidine-3'-phosphate
  modified_base 10: mod_base = OTHER; note = 2'-fluorocytidine-3'-phosphate
  modified_base 11: mod_base = OTHER; note = 2'-fluorocytidine-3'-phosphate
  modified_base 12: mod_base = OTHER; note = 2'-O-methyladenosine-3'-phosphate
  modified_base 13: mod_base = OTHER; note = 2'-O-methyluridine-3'-phosphate
  modified_base 14: mod_base = OTHER; note = 2'-O-methylguanosine-3'-phosphate
  modified_base 15: mod_base = OTHER; note = 2'-O-methyladenosine-3'-phosphate
  modified_base 16: mod_base = OTHER; note = 2'-O-methylguanosine-3'-phosphate
  modified_base 17: mod_base = OTHER; note = 2'-O-methylguanosine-3'-phosphate
  modified_base 18: mod_base = OTHER; note = 2'-O-methylguanosine-3'-phosphate
  modified_base 19: mod_base = OTHER; note = 2'-O-methyladenosine-3'-phosphate
  modified_base 20: mod_base = OTHER; note = 2'-O-methylcytidine-3'-phosphate
  modified_base 21: mod_base = OTHER; note = 2'-O-methyladenosine-3'-phosphate N-[tris(GalNAc-alkyl)-amidodecanoyl)]-4-hydroxyprolinol Hyp-(GalNAc-alkyl)3 (2S,4R)-1-[29-[[2-(acetylamino)-2-deoxy-beta-D-galactopyran osyl]oxy]-14,14-bis[[3-[[3-[[5-[[2-(acetylamino)-2-deoxy-be ta-D-galactopyranosyl]oxy]-1-oxopentyl]amino]propyl]amino]- 3-oxopropoxy]methyl]-1,12,19,25-tetraoxo-16-oxa-13,20,24-tr iazanonacos-1-yl]-4-hydroxy-2-hydroxymethylpyrrolidine
acccagagcccatgagggaca

SEQ ID NO: 635 - RNA, 21 nt, synthetic construct
  source 1..21: mol_type = other RNA
  modified_base 1: mod_base = OTHER; note = 2'-O-methylcytidine-3'- phosphorothioate
  modified_base 2: mod_base = OTHER; note = 2'-O-methylguanosine-3'- phosphorothioate
  modified_base 3: mod_base = OTHER; note = 2'-O-methylcytidine-3'-phosphate
  modified_base 4: mod_base = OTHER; note = 2'-O-methyluridine-3'-phosphate
  modified_base 5: mod_base = OTHER; note = 2'-O-methylcytidine-3'-phosphate
  modified_base 6: mod_base = OTHER; note = 2'-O-hexadecyl-cytidine-3'-phosphate
  modified_base 7: mod_base = OTHER; note = 2'-fluorocytidine-3'-phosphate
  modified_base 8: mod_base = OTHER; note = 2'-O-methyluridine-3'-phosphate
  modified_base 9: mod_base = OTHER; note = 2'-fluorocytidine-3'-phosphate
  modified_base 10: mod_base = OTHER; note = 2'-fluoroadenosine-3'-phosphate
  modified_base 11: mod_base = OTHER; note = 2'-fluorocytidine-3'-phosphate
  modified_base 12: mod_base = OTHER; note = 2'-O-methyluridine-3'-phosphate
  modified_base 13: mod_base = OTHER; note = 2'-O-methyluridine-3'-phosphate
  modified_base 14: mod_base = OTHER; note = 2'-O-methylguanosine-3'-phosphate
  modified_base 15: mod_base = OTHER; note = 2'-O-methylguanosine-3'-phosphate
  modified_base 16: mod_base = OTHER; note = 2'-O-methylguanosine-3'-phosphate
  modified_base 17: mod_base = OTHER; note = 2'-O-methyluridine-3'-phosphate
  modified_base 18: mod_base = OTHER; note = 2'-O-methylcytidine-3'-phosphate
  modified_base 19: mod_base = OTHER; note = 2'-O-methyluridine-3'-phosphate
  modified_base 20: mod_base = OTHER; note = 2'-O-methyluridine-3'-phosphate
  modified_base 21: mod_base = OTHER; note = 2'-O-methyladenosine-3'-phosphate N-[tris(GalNAc-alkyl)-amidodecanoyl)]-4-hydroxyprolinol Hyp-(GalNAc-alkyl)3 (2S,4R)-1-[29-[[2-(acetylamino)-2-deoxy-beta-D-galactopyran osyl]oxy]-14,14-bis[[3-[[3-[[5-[[2-(acetylamino)-2-deoxy-be ta-D-galactopyranosyl]oxy]-1-oxopentyl]amino]propyl]amino]- 3-oxopropoxy]methyl]-1,12,19,25-tetraoxo-16-oxa-13,20,24-tr iazanonacos-1-yl]-4-hydroxy-2-hydroxymethylpyrrolidine
cgctccctcacttgggtctta

SEQ ID NO: 636 - RNA, 21 nt, synthetic construct
  source 1..21: mol_type = other RNA
  modified_base 1: mod_base = OTHER; note = 2'-O-methylcytidine-3'- phosphorothioate
  modified_base 2: mod_base = OTHER; note = 2'-O-methylguanosine-3'- phosphorothioate
  modified_base 3: mod_base = OTHER; note = 2'-O-methylcytidine-3'-phosphate
  modified_base 4: mod_base = OTHER; note = 2'-O-methyluridine-3'-phosphate
  modified_base 5: mod_base = OTHER; note = 2'-O-methylcytidine-3'-phosphate
  modified_base 6: mod_base = OTHER; note = 2'-O-hexadecyl-cytidine-3'-phosphate
  modified_base 7: mod_base = OTHER; note = 2'-O-methylcytidine-3'-phosphate
  modified_base 8: mod_base = OTHER; note = 2'-O-methyluridine-3'-phosphate
  modified_base 9: mod_base = OTHER; note = 2'-fluorocytidine-3'-phosphate
  modified_base 10: mod_base = OTHER; note = 2'-fluoroadenosine-3'-phosphate
  modified_base 11: mod_base = OTHER; note = 2'-fluorocytidine-3'-phosphate
  modified_base 12: mod_base = OTHER; note = 2'-O-methyluridine-3'-phosphate
  modified_base 13: mod_base = OTHER; note = 2'-O-methyluridine-3'-phosphate
  modified_base 14: mod_base = OTHER; note = 2'-O-methylguanosine-3'-phosphate
  modified_base 15: mod_base = OTHER; note = 2'-O-methylguanosine-3'-phosphate
  modified_base 16: mod_base = OTHER; note = 2'-O-methylguanosine-3'-phosphate
  modified_base 17: mod_base = OTHER; note = 2'-O-methyluridine-3'-phosphate
  modified_base 18: mod_base = OTHER; note = 2'-O-methylcytidine-3'-phosphate
  modified_base 19: mod_base = OTHER; note = 2'-O-methyluridine-3'-phosphate
  modified_base 20: mod_base = OTHER; note = 2'-O-methyluridine-3'-phosphate
  modified_base 21: mod_base = OTHER; note = 2'-O-methyladenosine-3'-phosphate N-[tris(GalNAc-alkyl)-amidodecanoyl)]-4-hydroxyprolinol Hyp-(GalNAc-alkyl)3 (2S,4R)-1-[29-[[2-(acetylamino)-2-deoxy-beta-D-galactopyran osyl]oxy]-14,14-bis[[3-[[3-[[5-[[2-(acetylamino)-2-deoxy-be ta-D-galactopyranosyl]oxy]-1-oxopentyl]amino]propyl]amino]- 3-oxopropoxy]methyl]-1,12,19,25-tetraoxo-16-oxa-13,20,24-tr iazanonacos-1-yl]-4-hydroxy-2-hydroxymethylpyrrolidine
cgctccctcacttgggtctta

SEQ ID NO: 637 - RNA, 21 nt, synthetic construct
  source 1..21: mol_type = other RNA
  modified_base 1: mod_base = OTHER; note = 2'-O-methylcytidine-3'- phosphorothioate
  modified_base 2: mod_base = OTHER; note = 2'-O-methyluridine-3'-phosphorothioate
  modified_base 3: mod_base = OTHER; note = 2'-O-methylcytidine-3'-phosphate
  modified_base 4: mod_base = OTHER; note = 2'-O-methylcytidine-3'-phosphate
  modified_base 5: mod_base = OTHER; note = 2'-O-methylcytidine-3'-phosphate
  modified_base 6: mod_base = OTHER; note = 2'-O-hexadecyl-uridine-3'-phosphate
  modified_base 7: mod_base = OTHER; note = 2'-fluorocytidine-3'-phosphate
  modified_base 8: mod_base = OTHER; note = 2'-O-methyladenosine-3'-phosphate
  modified_base 9: mod_base = OTHER; note = 2'-fluorocytidine-3'-phosphate
  modified_base 10: mod_base = OTHER; note = 2'-fluorouridine-3'-phosphate
  modified_base 11: mod_base = OTHER; note = 2'-fluorouridine-3'-phosphate
  modified_base 12: mod_base = OTHER; note = 2'-O-methylguanosine-3'-phosphate
  modified_base 13: mod_base = OTHER; note = 2'-O-methylguanosine-3'-phosphate
  modified_base 14: mod_base = OTHER; note = 2'-O-methylguanosine-3'-phosphate
  modified_base 15: mod_base = OTHER; note = 2'-O-methyluridine-3'-phosphate
  modified_base 16: mod_base = OTHER; note = 2'-O-methylcytidine-3'-phosphate
  modified_base 17: mod_base = OTHER; note = 2'-O-methyluridine-3'-phosphate
  modified_base 18: mod_base = OTHER; note = 2'-O-methyluridine-3'-phosphate
  modified_base 19: mod_base = OTHER; note = 2'-O-methylcytidine-3'-phosphate
  modified_base 20: mod_base = OTHER; note = 2'-O-methylcytidine-3'-phosphate
  modified_base 21: mod_base = OTHER; note = 2'-O-methyladenosine-3'-phosphate N-[tris(GalNAc-alkyl)-amidodecanoyl)]-4-hydroxyprolinol Hyp-(GalNAc-alkyl)3 (2S,4R)-1-[29-[[2-(acetylamino)-2-deoxy-beta-D-galactopyran osyl]oxy]-14,14-bis[[3-[[3-[[5-[[2-(acetylamino)-2-deoxy-be ta-D-galactopyranosyl]oxy]-1-oxopentyl]amino]propyl]amino]- 3-oxopropoxy]methyl]-1,12,19,25-tetraoxo-16-oxa-13,20,24-tr iazanonacos-1-yl]-4-hydroxy-2-hydroxymethylpyrrolidine
ctccctcacttgggtcttcca

SEQ ID NO: 638 - RNA, 21 nt, synthetic construct
  source 1..21: mol_type = other RNA
  modified_base 1: mod_base = OTHER; note = 2'-O-methylcytidine-3'- phosphorothioate
  modified_base 2: mod_base = OTHER; note = 2'-O-methylcytidine-3'- phosphorothioate
  modified_base 3: mod_base = OTHER; note = 2'-O-methylcytidine-3'-phosphate
  modified_base 4: mod_base = OTHER; note = 2'-O-methyluridine-3'-phosphate
  modified_base 5: mod_base = OTHER; note = 2'-O-methylcytidine-3'-phosphate
  modified_base 6: mod_base = OTHER; note = 2'-O-hexadecyl-adenosine-3'-phosphate
  modified_base 7: mod_base = OTHER; note = 2'-fluorocytidine-3'-phosphate
  modified_base 8: mod_base = OTHER; note = 2'-O-methyluridine-3'-phosphate
  modified_base 9: mod_base = OTHER; note = 2'-fluorouridine-3'-phosphate
  modified_base 10: mod_base = OTHER; note = 2'-fluoroguanosine-3'-phosphate
  modified_base 11: mod_base = OTHER; note = 2'-fluoroguanosine-3'-phosphate
  modified_base 12: mod_base = OTHER; note = 2'-O-methylguanosine-3'-phosphate
  modified_base 13: mod_base = OTHER; note = 2'-O-methyluridine-3'-phosphate
  modified_base 14: mod_base = OTHER; note = 2'-O-methylcytidine-3'-phosphate
  modified_base 15: mod_base = OTHER; note = 2'-O-methyluridine-3'-phosphate
  modified_base 16: mod_base = OTHER; note = 2'-O-methyluridine-3'-phosphate
  modified_base 17: mod_base = OTHER; note = 2'-O-methylcytidine-3'-phosphate
  modified_base 18: mod_base = OTHER; note = 2'-O-methylcytidine-3'-phosphate
  modified_base 19: mod_base = OTHER; note = 2'-O-methylcytidine-3'-phosphate
  modified_base 20: mod_base = OTHER; note = 2'-O-methyluridine-3'-phosphate
  modified_base 21: mod_base = OTHER; note = 2'-O-methyladenosine-3'-phosphate N-[tris(GalNAc-alkyl)-amidodecanoyl)]-4-hydroxyprolinol Hyp-(GalNAc-alkyl)3 (2S,4R)-1-[29-[[2-(acetylamino)-2-deoxy-beta-D-galactopyran osyl]oxy]-14,14-bis[[3-[[3-[[5-[[2-(acetylamino)-2-deoxy-be ta-D-galactopyranosyl]oxy]-1-oxopentyl]amino]propyl]amino]- 3-oxopropoxy]methyl]-1,12,19,25-tetraoxo-16-oxa-13,20,24-tr iazanonacos-1-yl]-4-hydroxy-2-hydroxymethylpyrrolidine
ccctcacttgggtcttcccta

SEQ ID NO: 639 - RNA, 21 nt, synthetic construct
  source 1..21: mol_type = other RNA
  modified_base 1: mod_base = OTHER; note = 2'-O-methylcytidine-3'- phosphorothioate
  modified_base 2: mod_base = OTHER; note = 2'-O-methylcytidine-3'- phosphorothioate
  modified_base 3: mod_base = OTHER; note = 2'-O-methyluridine-3'-phosphate
  modified_base 4: mod_base = OTHER; note = 2'-O-methylcytidine-3'-phosphate
  modified_base 5: mod_base = OTHER; note = 2'-O-methyladenosine-3'-phosphate
  modified_base 6: mod_base = OTHER; note = 2'-O-hexadecyl-cytidine-3'-phosphate
  modified_base 7: mod_base = OTHER; note = 2'-fluorouridine-3'-phosphate
  modified_base 8: mod_base = OTHER; note = 2'-O-methyluridine-3'-phosphate
  modified_base 9: mod_base = OTHER; note = 2'-fluoroguanosine-3'-phosphate
  modified_base 10: mod_base = OTHER; note = 2'-fluoroguanosine-3'-phosphate
  modified_base 11: mod_base = OTHER; note = 2'-fluoroguanosine-3'-phosphate
  modified_base 12: mod_base = OTHER; note = 2'-O-methyluridine-3'-phosphate
  modified_base 13: mod_base = OTHER; note = 2'-O-methylcytidine-3'-phosphate
  modified_base 14: mod_base = OTHER; note = 2'-O-methyluridine-3'-phosphate
  modified_base 15: mod_base = OTHER; note = 2'-O-methyluridine-3'-phosphate
  modified_base 16: mod_base = OTHER; note = 2'-O-methylcytidine-3'-phosphate
  modified_base 17: mod_base = OTHER; note = 2'-O-methylcytidine-3'-phosphate
  modified_base 18: mod_base = OTHER; note = 2'-O-methylcytidine-3'-phosphate
  modified_base 19: mod_base = OTHER; note = 2'-O-methyluridine-3'-phosphate
  modified_base 20: mod_base = OTHER; note = 2'-O-methyluridine-3'-phosphate
  modified_base 21: mod_base = OTHER; note = 2'-O-methyladenosine-3'-phosphate N-[tris(GalNAc-alkyl)-amidodecanoyl)]-4-hydroxyprolinol Hyp-(GalNAc-alkyl)3 (2S,4R)-1-[29-[[2-(acetylamino)-2-deoxy-beta-D-galactopyran osyl]oxy]-14,14-bis[[3-[[3-[[5-[[2-(acetylamino)-2-deoxy-be ta-D-galactopyranosyl]oxy]-1-oxopentyl]amino]propyl]amino]- 3-oxopropoxy]methyl]-1,12,19,25-tetraoxo-16-oxa-13,20,24-tr iazanonacos-1-yl]-4-hydroxy-2-hydroxymethylpyrrolidine
cctcacttgggtcttccctta

SEQ ID NO: 640 - RNA, 21 nt, synthetic construct
  source 1..21: mol_type = other RNA
  modified_base 1: mod_base = OTHER; note = 2'-O-methylcytidine-3'- phosphorothioate
  modified_base 2: mod_base = OTHER; note = 2'-O-methylcytidine-3'- phosphorothioate
  modified_base 3: mod_base = OTHER; note = 2'-O-methyluridine-3'-phosphate
  modified_base 4: mod_base = OTHER; note = 2'-O-methylcytidine-3'-phosphate
  modified_base 5: mod_base = OTHER; note = 2'-O-methyladenosine-3'-phosphate
  modified_base 6: mod_base = OTHER; note = 2'-O-hexadecyl-cytidine-3'-phosphate
  modified_base 7: mod_base = OTHER; note = 2'-O-methyluridine-3'-phosphate
  modified_base 8: mod_base = OTHER; note = 2'-O-methyluridine-3'-phosphate
  modified_base 9: mod_base = OTHER; note = 2'-fluoroguanosine-3'-phosphate
  modified_base 10: mod_base = OTHER; note = 2'-fluoroguanosine-3'-phosphate
  modified_base 11: mod_base = OTHER; note = 2'-fluoroguanosine-3'-phosphate
  modified_base 12: mod_base = OTHER; note = 2'-O-methyluridine-3'-phosphate
  modified_base 13: mod_base = OTHER; note = 2'-O-methylcytidine-3'-phosphate
  modified_base 14: mod_base = OTHER; note = 2'-O-methyluridine-3'-phosphate
  modified_base 15: mod_base = OTHER; note = 2'-O-methyluridine-3'-phosphate
  modified_base 16: mod_base = OTHER; note = 2'-O-methylcytidine-3'-phosphate
  modified_base 17: mod_base = OTHER; note = 2'-O-methylcytidine-3'-phosphate
  modified_base 18: mod_base = OTHER; note = 2'-O-methylcytidine-3'-phosphate
  modified_base 19: mod_base = OTHER; note = 2'-O-methyluridine-3'-phosphate
  modified_base 20: mod_base = OTHER; note = 2'-O-methyluridine-3'-phosphate
  modified_base 21: mod_base = OTHER; note = 2'-O-methyladenosine-3'-phosphate N-[tris(GalNAc-alkyl)-amidodecanoyl)]-4-hydroxyprolinol Hyp-(GalNAc-alkyl)3 (2S,4R)-1-[29-[[2-(acetylamino)-2-deoxy-beta-D-galactopyran osyl]oxy]-14,14-bis[[3-[[3-[[5-[[2-(acetylamino)-2-deoxy-be ta-D-galactopyranosyl]oxy]-1-oxopentyl]amino]propyl]amino]- 3-oxopropoxy]methyl]-1,12,19,25-tetraoxo-16-oxa-13,20,24-tr iazanonacos-1-yl]-4-hydroxy-2-hydroxymethylpyrrolidine
cctcacttgggtcttccctta

SEQ ID NO: 641 - RNA, 21 nt, synthetic construct
  source 1..21: mol_type = other RNA
  modified_base 1: mod_base = OTHER; note = 2'-O-methylcytidine-3'- phosphorothioate
  modified_base 2: mod_base = OTHER; note = 2'-O-methyladenosine-3'- phosphorothioate
  modified_base 3: mod_base = OTHER; note = 2'-O-methylcytidine-3'-phosphate
  modified_base 4: mod_base = OTHER; note = 2'-O-methyluridine-3'-phosphate
  modified_base 5: mod_base = OTHER; note = 2'-O-methyluridine-3'-phosphate
  modified_base 6: mod_base = OTHER; note = 2'-O-hexadecyl-guanosine-3'-phosphate
  modified_base 7: mod_base = OTHER; note = 2'-fluoroguanosine-3'-phosphate
  modified_base 8: mod_base = OTHER; note = 2'-O-methylguanosine-3'-phosphate
  modified_base 9: mod_base = OTHER; note = 2'-fluorouridine-3'-phosphate
  modified_base 10: mod_base = OTHER; note = 2'-fluorocytidine-3'-phosphate
  modified_base 11: mod_base = OTHER; note = 2'-fluorouridine-3'-phosphate
  modified_base 12: mod_base = OTHER; note = 2'-O-methyluridine-3'-phosphate
  modified_base 13: mod_base = OTHER; note = 2'-O-methylcytidine-3'-phosphate
  modified_base 14: mod_base = OTHER; note = 2'-O-methylcytidine-3'-phosphate
  modified_base 15: mod_base = OTHER; note = 2'-O-methylcytidine-3'-phosphate
  modified_base 16: mod_base = OTHER; note = 2'-O-methyluridine-3'-phosphate
  modified_base 17: mod_base = OTHER; note = 2'-O-methyluridine-3'-phosphate
  modified_base 18: mod_base = OTHER; note = 2'-O-methylguanosine-3'-phosphate
  modified_base 19: mod_base = OTHER; note = 2'-O-methyluridine-3'-phosphate
  modified_base 20: mod_base = OTHER; note = 2'-O-methylcytidine-3'-phosphate
  modified_base 21: mod_base = OTHER; note = 2'-O-methyladenosine-3'-phosphate N-[tris(GalNAc-alkyl)-amidodecanoyl)]-4-hydroxyprolinol Hyp-(GalNAc-alkyl)3 (2S,4R)-1-[29-[[2-(acetylamino)-2-deoxy-beta-D-galactopyran osyl]oxy]-14,14-bis[[3-[[3-[[5-[[2-(acetylamino)-2-deoxy-be ta-D-galactopyranosyl]oxy]-1-oxopentyl]amino]propyl]amino]- 3-oxopropoxy]methyl]-1,12,19,25-tetraoxo-16-oxa-13,20,24-tr iazanonacos-1-yl]-4-hydroxy-2-hydroxymethylpyrrolidine
cacttgggtcttcccttgtca

SEQ ID NO: 642 - RNA, 21 nt, synthetic construct
  source 1..21: mol_type = other RNA
  modified_base 1: mod_base = OTHER; note = 2'-O-methylcytidine-3'- phosphorothioate
  modified_base 2: mod_base = OTHER; note = 2'-O-methyladenosine-3'- phosphorothioate
  modified_base 3: mod_base = OTHER; note = 2'-O-methylcytidine-3'-phosphate
  modified_base 4: mod_base = OTHER; note = 2'-O-methyluridine-3'-phosphate
  modified_base 5: mod_base = OTHER; note = 2'-O-methyluridine-3'-phosphate
  modified_base 6: mod_base = OTHER; note = 2'-O-hexadecyl-guanosine-3'-phosphate
  modified_base 7: mod_base = OTHER; note = 2'-O-methylguanosine-3'-phosphate
  modified_base 8: mod_base = OTHER; note = 2'-O-methylguanosine-3'-phosphate
  modified_base 9: mod_base = OTHER; note = 2'-fluorouridine-3'-phosphate
  modified_base 10: mod_base = OTHER; note = 2'-fluorocytidine-3'-phosphate
  modified_base 11: mod_base = OTHER; note = 2'-fluorouridine-3'-phosphate
  modified_base 12: mod_base = OTHER; note = 2'-O-methyluridine-3'-phosphate
  modified_base 13: mod_base = OTHER; note = 2'-O-methylcytidine-3'-phosphate
  modified_base 14: mod_base = OTHER; note = 2'-O-methylcytidine-3'-phosphate
  modified_base 15: mod_base = OTHER; note = 2'-O-methylcytidine-3'-phosphate
  modified_base 16: mod_base = OTHER; note = 2'-O-methyluridine-3'-phosphate
  modified_base 17: mod_base = OTHER; note = 2'-O-methyluridine-3'-phosphate
  modified_base 18: mod_base = OTHER; note = 2'-O-methylguanosine-3'-phosphate
  modified_base 19: mod_base = OTHER; note = 2'-O-methyluridine-3'-phosphate
  modified_base 20: mod_base = OTHER; note = 2'-O-methylcytidine-3'-phosphate
  modified_base 21: mod_base = OTHER; note = 2'-O-methyladenosine-3'-phosphate N-[tris(GalNAc-alkyl)-amidodecanoyl)]-4-hydroxyprolinol Hyp-(GalNAc-alkyl)3 (2S,4R)-1-[29-[[2-(acetylamino)-2-deoxy-beta-D-galactopyran osyl]oxy]-14,14-bis[[3-[[3-[[5-[[2-(acetylamino)-2-deoxy-be ta-D-galactopyranosyl]oxy]-1-oxopentyl]amino]propyl]amino]- 3-oxopropoxy]methyl]-1,12,19,25-tetraoxo-16-oxa-13,20,24-tr iazanonacos-1-yl]-4-hydroxy-2-hydroxymethylpyrrolidine
cacttgggtcttcccttgtca

SEQ ID NO: 643 - RNA, 21 nt, synthetic construct
  source 1..21: mol_type = other RNA
  modified_base 1: mod_base = OTHER; note = 2'-O-methyladenosine-3'- phosphorothioate
  modified_base 2: mod_base = OTHER; note = 2'-O-methylcytidine-3'- phosphorothioate
  modified_base 3: mod_base = OTHER; note = 2'-O-methyluridine-3'-phosphate
  modified_base 4: mod_base = OTHER; note = 2'-O-methyluridine-3'-phosphate
  modified_base 5: mod_base = OTHER; note = 2'-O-methylguanosine-3'-phosphate
  modified_base 6: mod_base = OTHER; note = 2'-O-hexadecyl-guanosine-3'-phosphate
  modified_base 7: mod_base = OTHER; note = 2'-fluoroguanosine-3'-phosphate
  modified_base 8: mod_base = OTHER; note = 2'-O-methyluridine-3'-phosphate
  modified_base 9: mod_base = OTHER; note = 2'-fluorocytidine-3'-phosphate
  modified_base 10: mod_base = OTHER; note = 2'-fluorouridine-3'-phosphate
  modified_base 11: mod_base = OTHER; note = 2'-fluorouridine-3'-phosphate
  modified_base 12: mod_base = OTHER; note = 2'-O-methylcytidine-3'-phosphate
  modified_base 13: mod_base = OTHER; note = 2'-O-methylcytidine-3'-phosphate
  modified_base 14: mod_base = OTHER; note = 2'-O-methylcytidine-3'-phosphate
  modified_base 15: mod_base = OTHER; note = 2'-O-methyluridine-3'-phosphate
  modified_base 16: mod_base = OTHER; note = 2'-O-methyluridine-3'-phosphate
  modified_base 17: mod_base = OTHER; note = 2'-O-methylguanosine-3'-phosphate
  modified_base 18: mod_base = OTHER; note = 2'-O-methyluridine-3'-phosphate
  modified_base 19: mod_base = OTHER; note = 2'-O-methylcytidine-3'-phosphate
  modified_base 20: mod_base = OTHER; note = 2'-O-methylcytidine-3'-phosphate
  modified_base 21: mod_base = OTHER; note = 2'-O-methyladenosine-3'-phosphate N-[tris(GalNAc-alkyl)-amidodecanoyl)]-4-hydroxyprolinol Hyp-(GalNAc-alkyl)3 (2S,4R)-1-[29-[[2-(acetylamino)-2-deoxy-beta-D-galactopyran osyl]oxy]-14,14-bis[[3-[[3-[[5-[[2-(acetylamino)-2-deoxy-be ta-D-galactopyranosyl]oxy]-1-oxopentyl]amino]propyl]amino]- 3-oxopropoxy]methyl]-1,12,19,25-tetraoxo-16-oxa-13,20,24-tr iazanonacos-1-yl]-4-hydroxy-2-hydroxymethylpyrrolidine
acttgggtcttcccttgtcca

SEQ ID NO: 644 - RNA, 21 nt, synthetic construct
  source 1..21: mol_type = other RNA
  modified_base 1: mod_base = OTHER; note = 2'-O-methyladenosine-3'- phosphorothioate
  modified_base 2: mod_base = OTHER; note = 2'-O-methylcytidine-3'- phosphorothioate
  modified_base 3: mod_base = OTHER; note = 2'-O-methyluridine-3'-phosphate
  modified_base 4: mod_base = OTHER; note = 2'-O-methyluridine-3'-phosphate
  modified_base 5: mod_base = OTHER; note = 2'-O-methylguanosine-3'-phosphate
  modified_base 6: mod_base = OTHER; note = 2'-O-hexadecyl-guanosine-3'-phosphate
  modified_base 7: mod_base = OTHER; note = 2'-O-methylguanosine-3'-phosphate
  modified_base 8: mod_base = OTHER; note = 2'-O-methyluridine-3'-phosphate
  modified_base 9: mod_base = OTHER; note = 2'-fluorocytidine-3'-phosphate
  modified_base 10: mod_base = OTHER; note = 2'-fluorouridine-3'-phosphate
  modified_base 11: mod_base = OTHER; note = 2'-fluorouridine-3'-phosphate
  modified_base 12: mod_base = OTHER; note = 2'-O-methylcytidine-3'-phosphate
  modified_base 13: mod_base = OTHER; note = 2'-O-methylcytidine-3'-phosphate
  modified_base 14: mod_base = OTHER; note = 2'-O-methylcytidine-3'-phosphate
  modified_base 15: mod_base = OTHER; note = 2'-O-methyluridine-3'-phosphate
  modified_base 16: mod_base = OTHER; note = 2'-O-methyluridine-3'-phosphate
  modified_base 17: mod_base = OTHER; note = 2'-O-methylguanosine-3'-phosphate
  modified_base 18: mod_base = OTHER; note = 2'-O-methyluridine-3'-phosphate
  modified_base 19: mod_base = OTHER; note = 2'-O-methylcytidine-3'-phosphate
  modified_base 20: mod_base = OTHER; note = 2'-O-methylcytidine-3'-phosphate
  modified_base 21: mod_base = OTHER; note = 2'-O-methyladenosine-3'-phosphate N-[tris(GalNAc-alkyl)-amidodecanoyl)]-4-hydroxyprolinol Hyp-(GalNAc-alkyl)3 (2S,4R)-1-[29-[[2-(acetylamino)-2-deoxy-beta-D-galactopyran osyl]oxy]-14,14-bis[[3-[[3-[[5-[[2-(acetylamino)-2-deoxy-be ta-D-galactopyranosyl]oxy]-1-oxopentyl]amino]propyl]amino]- 3-oxopropoxy]methyl]-1,12,19,25-tetraoxo-16-oxa-13,20,24-tr iazanonacos-1-yl]-4-hydroxy-2-hydroxymethylpyrrolidine
acttgggtcttcccttgtcca

SEQ ID NO: 645 - RNA, 21 nt, synthetic construct
  source 1..21: mol_type = other RNA
  modified_base 1: mod_base = OTHER; note = 2'-O-methylcytidine-3'- phosphorothioate
  modified_base 2: mod_base = OTHER; note = 2'-O-methyluridine-3'-phosphorothioate
  modified_base 3: mod_base = OTHER; note = 2'-O-methyluridine-3'-phosphate
  modified_base 4: mod_base = OTHER; note = 2'-O-methylguanosine-3'-phosphate
  modified_base 5: mod_base = OTHER; note = 2'-O-methylguanosine-3'-phosphate
  modified_base 6: mod_base = OTHER; note = 2'-O-hexadecyl-guanosine-3'-phosphate
  modified_base 7: mod_base = OTHER; note = 2'-fluorouridine-3'-phosphate
  modified_base 8: mod_base = OTHER; note = 2'-O-methylcytidine-3'-phosphate
  modified_base 9: mod_base = OTHER; note = 2'-fluorouridine-3'-phosphate
  modified_base 10: mod_base = OTHER; note = 2'-fluorouridine-3'-phosphate
  modified_base 11: mod_base = OTHER; note = 2'-fluorocytidine-3'-phosphate
  modified_base 12: mod_base = OTHER; note = 2'-O-methylcytidine-3'-phosphate
  modified_base 13: mod_base = OTHER; note = 2'-O-methylcytidine-3'-phosphate
  modified_base 14: mod_base = OTHER; note = 2'-O-methyluridine-3'-phosphate
  modified_base 15: mod_base = OTHER; note = 2'-O-methyluridine-3'-phosphate
  modified_base 16: mod_base = OTHER; note = 2'-O-methylguanosine-3'-phosphate
  modified_base 17: mod_base = OTHER; note = 2'-O-methyluridine-3'-phosphate
  modified_base 18: mod_base = OTHER; note = 2'-O-methylcytidine-3'-phosphate
  modified_base 19: mod_base = OTHER; note = 2'-O-methylcytidine-3'-phosphate
  modified_base 20: mod_base = OTHER; note = 2'-O-methyluridine-3'-phosphate
  modified_base 21: mod_base = OTHER; note = 2'-O-methyladenosine-3'-phosphate N-[tris(GalNAc-alkyl)-amidodecanoyl)]-4-hydroxyprolinol Hyp-(GalNAc-alkyl)3 (2S,4R)-1-[29-[[2-(acetylamino)-2-deoxy-beta-D-galactopyran osyl]oxy]-14,14-bis[[3-[[3-[[5-[[2-(acetylamino)-2-deoxy-be ta-D-galactopyranosyl]oxy]-1-oxopentyl]amino]propyl]amino]- 3-oxopropoxy]methyl]-1,12,19,25-tetraoxo-16-oxa-13,20,24-tr iazanonacos-1-yl]-4-hydroxy-2-hydroxymethylpyrrolidine
cttgggtcttcccttgtccta

SEQ ID NO: 646 - RNA, 21 nt, synthetic construct
  source 1..21: mol_type = other RNA
  modified_base 1: mod_base = OTHER; note = 2'-O-methylcytidine-3'- phosphorothioate
  modified_base 2: mod_base = OTHER; note = 2'-O-methyluridine-3'-phosphorothioate
  modified_base 3: mod_base = OTHER; note = 2'-O-methyluridine-3'-phosphate
  modified_base 4: mod_base = OTHER; note = 2'-O-methylguanosine-3'-phosphate
  modified_base 5: mod_base = OTHER; note = 2'-O-methylguanosine-3'-phosphate
  modified_base 6: mod_base = OTHER; note = 2'-O-hexadecyl-guanosine-3'-phosphate
  modified_base 7: mod_base = OTHER; note = 2'-O-methyluridine-3'-phosphate
  modified_base 8: mod_base = OTHER; note = 2'-O-methylcytidine-3'-phosphate
  modified_base 9: mod_base = OTHER; note = 2'-fluorouridine-3'-phosphate
  modified_base 10: mod_base = OTHER; note = 2'-fluorouridine-3'-phosphate
  modified_base 11: mod_base = OTHER; note = 2'-fluorocytidine-3'-phosphate
  modified_base 12: mod_base = OTHER; note = 2'-O-methylcytidine-3'-phosphate
  modified_base 13: mod_base = OTHER; note = 2'-O-methylcytidine-3'-phosphate
  modified_base 14: mod_base = OTHER; note = 2'-O-methyluridine-3'-phosphate
  modified_base 15: mod_base = OTHER; note = 2'-O-methyluridine-3'-phosphate
  modified_base 16: mod_base = OTHER; note = 2'-O-methylguanosine-3'-phosphate
  modified_base 17: mod_base = OTHER; note = 2'-O-methyluridine-3'-phosphate
  modified_base 18: mod_base = OTHER; note = 2'-O-methylcytidine-3'-phosphate
  modified_base 19: mod_base = OTHER; note = 2'-O-methylcytidine-3'-phosphate
  modified_base 20: mod_base = OTHER; note = 2'-O-methyluridine-3'-phosphate
  modified_base 21: mod_base = OTHER; note = 2'-O-methyladenosine-3'-phosphate N-[tris(GalNAc-alkyl)-amidodecanoyl)]-4-hydroxyprolinol Hyp-(GalNAc-alkyl)3 (2S,4R)-1-[29-[[2-(acetylamino)-2-deoxy-beta-D-galactopyran osyl]oxy]-14,14-bis[[3-[[3-[[5-[[2-(acetylamino)-2-deoxy-be ta-D-galactopyranosyl]oxy]-1-oxopentyl]amino]propyl]amino]- 3-oxopropoxy]methyl]-1,12,19,25-tetraoxo-16-oxa-13,20,24-tr iazanonacos-1-yl]-4-hydroxy-2-hydroxymethylpyrrolidine
cttgggtcttcccttgtccta

SEQ ID NO: 647 - RNA, 21 nt, synthetic construct
  source 1..21: mol_type = other RNA
  modified_base 1: mod_base = OTHER; note = 2'-O-methyluridine-3'-phosphorothioate
  modified_base 2: mod_base = OTHER; note = 2'-O-methylguanosine-3'- phosphorothioate
  modified_base 3: mod_base = OTHER; note = 2'-O-methylguanosine-3'-phosphate
  modified_base 4: mod_base = OTHER; note = 2'-O-methylguanosine-3'-phosphate
  modified_base 5: mod_base = OTHER; note = 2'-O-methyluridine-3'-phosphate
  modified_base 6: mod_base = OTHER; note = 2'-O-hexadecyl-cytidine-3'-phosphate
  modified_base 7: mod_base = OTHER; note = 2'-fluorouridine-3'-phosphate
  modified_base 8: mod_base = OTHER; note = 2'-O-methyluridine-3'-phosphate
  modified_base 9: mod_base = OTHER; note = 2'-fluorocytidine-3'-phosphate
  modified_base 10: mod_base = OTHER; note = 2'-fluorocytidine-3'-phosphate
  modified_base 11: mod_base = OTHER; note = 2'-fluorocytidine-3'-phosphate
  modified_base 12: mod_base = OTHER; note = 2'-O-methyluridine-3'-phosphate
  modified_base 13: mod_base = OTHER; note = 2'-O-methyluridine-3'-phosphate
  modified_base 14: mod_base = OTHER; note = 2'-O-methylguanosine-3'-phosphate
  modified_base 15: mod_base = OTHER; note = 2'-O-methyluridine-3'-phosphate
  modified_base 16: mod_base = OTHER; note = 2'-O-methylcytidine-3'-phosphate
  modified_base 17: mod_base = OTHER; note = 2'-O-methylcytidine-3'-phosphate
  modified_base 18: mod_base = OTHER; note = 2'-O-methyluridine-3'-phosphate
  modified_base 19: mod_base = OTHER; note = 2'-O-methylcytidine-3'-phosphate
  modified_base 20: mod_base = OTHER; note = 2'-O-methyluridine-3'-phosphate
  modified_base 21: mod_base = OTHER; note = 2'-O-methyladenosine-3'-phosphate N-[tris(GalNAc-alkyl)-amidodecanoyl)]-4-hydroxyprolinol Hyp-(GalNAc-alkyl)3 (2S,4R)-1-[29-[[2-(acetylamino)-2-deoxy-beta-D-galactopyran osyl]oxy]-14,14-bis[[3-[[3-[[5-[[2-(acetylamino)-2-deoxy-be ta-D-galactopyranosyl]oxy]-1-oxopentyl]amino]propyl]amino]- 3-oxopropoxy]methyl]-1,12,19,25-tetraoxo-16-oxa-13,20,24-tr iazanonacos-1-yl]-4-hydroxy-2-hydroxymethylpyrrolidine
tgggtcttcccttgtcctcta

SEQ ID NO: 648 - RNA, 21 nt, synthetic construct
  source 1..21: mol_type = other RNA
  modified_base 1: mod_base = OTHER; note = 2'-O-methylguanosine-3'- phosphorothioate
  modified_base 2: mod_base = OTHER; note = 2'-O-methyluridine-3'-phosphorothioate
  modified_base 3: mod_base = OTHER; note = 2'-O-methylcytidine-3'-phosphate
  modified_base 4: mod_base = OTHER; note = 2'-O-methyluridine-3'-phosphate
  modified_base 5: mod_base = OTHER; note = 2'-O-methyluridine-3'-phosphate
  modified_base 6: mod_base = OTHER; note = 2'-O-hexadecyl-cytidine-3'-phosphate
  modified_base 7: mod_base = OTHER; note = 2'-fluorocytidine-3'-phosphate
  modified_base 8: mod_base = OTHER; note = 2'-O-methylcytidine-3'-phosphate
  modified_base 9: mod_base = OTHER; note = 2'-fluorouridine-3'-phosphate
  modified_base 10: mod_base = OTHER; note = 2'-fluorouridine-3'-phosphate
  modified_base 11: mod_base = OTHER; note = 2'-fluoroguanosine-3'-phosphate
  modified_base 12: mod_base = OTHER; note = 2'-O-methyluridine-3'-phosphate
  modified_base 13: mod_base = OTHER; note = 2'-O-methylcytidine-3'-phosphate
  modified_base 14: mod_base = OTHER; note = 2'-O-methylcytidine-3'-phosphate
  modified_base 15: mod_base = OTHER; note = 2'-O-methyluridine-3'-phosphate
  modified_base 16: mod_base = OTHER; note = 2'-O-methylcytidine-3'-phosphate
  modified_base 17: mod_base = OTHER; note = 2'-O-methyluridine-3'-phosphate
  modified_base 18: mod_base = OTHER; note = 2'-O-methylcytidine-3'-phosphate
  modified_base 19: mod_base = OTHER; note = 2'-O-methylguanosine-3'-phosphate
  modified_base 20: mod_base = OTHER; note = 2'-O-methylcytidine-3'-phosphate
  modified_base 21: mod_base = OTHER; note = 2'-O-methyladenosine-3'-phosphate N-[tris(GalNAc-alkyl)-amidodecanoyl)]-4-hydroxyprolinol Hyp-(GalNAc-alkyl)3 (2S,4R)-1-[29-[[2-(acetylamino)-2-deoxy-beta-D-galactopyran osyl]oxy]-14,14-bis[[3-[[3-[[5-[[2-(acetylamino)-2-deoxy-be ta-D-galactopyranosyl]oxy]-1-oxopentyl]amino]propyl]amino]- 3-oxopropoxy]methyl]-1,12,19,25-tetraoxo-16-oxa-13,20,24-tr iazanonacos-1-yl]-4-hydroxy-2-hydroxymethylpyrrolidine
gtcttcccttgtcctctcgca

SEQ ID NO: 649 - RNA, 21 nt, synthetic construct
  source 1..21: mol_type = other RNA
  modified_base 1: mod_base = OTHER; note = 2'-O-methyluridine-3'-phosphorothioate
  modified_base 2: mod_base = OTHER; note = 2'-O-methylcytidine-3'- phosphorothioate
  modified_base 3: mod_base = OTHER; note = 2'-O-methyluridine-3'-phosphate
  modified_base 4: mod_base = OTHER; note = 2'-O-methyluridine-3'-phosphate
  modified_base 5: mod_base = OTHER; note = 2'-O-methylcytidine-3'-phosphate
  modified_base 6: mod_base = OTHER; note = 2'-O-hexadecyl-cytidine-3'-phosphate
  modified_base 7: mod_base = OTHER; note = 2'-fluorocytidine-3'-phosphate
  modified_base 8: mod_base = OTHER; note = 2'-O-methyluridine-3'-phosphate
  modified_base 9: mod_base = OTHER; note = 2'-fluorouridine-3'-phosphate
  modified_base 10: mod_base = OTHER; note = 2'-fluoroguanosine-3'-phosphate
  modified_base 11: mod_base = OTHER; note = 2'-fluorouridine-3'-phosphate
  modified_base 12: mod_base = OTHER; note = 2'-O-methylcytidine-3'-phosphate
  modified_base 13: mod_base = OTHER; note = 2'-O-methylcytidine-3'-phosphate
  modified_base 14: mod_base = OTHER; note = 2'-O-methyluridine-3'-phosphate
  modified_base 15: mod_base = OTHER; note = 2'-O-methylcytidine-3'-phosphate
  modified_base 16: mod_base = OTHER; note = 2'-O-methyluridine-3'-phosphate
  modified_base 17: mod_base = OTHER; note = 2'-O-methylcytidine-3'-phosphate
  modified_base 18: mod_base = OTHER; note = 2'-O-methylguanosine-3'-phosphate
  modified_base 19: mod_base = OTHER; note = 2'-O-methylcytidine-3'-phosphate
  modified_base 20: mod_base = OTHER; note = 2'-O-methylguanosine-3'-phosphate
  modified_base 21: mod_base = OTHER; note = 2'-O-methyladenosine-3'-phosphate N-[tris(GalNAc-alkyl)-amidodecanoyl)]-4-hydroxyprolinol Hyp-(GalNAc-alkyl)3 (2S,4R)-1-[29-[[2-(acetylamino)-2-deoxy-beta-D-galactopyran osyl]oxy]-14,14-bis[[3-[[3-[[5-[[2-(acetylamino)-2-deoxy-be ta-D-galactopyranosyl]oxy]-1-oxopentyl]amino]propyl]amino]- 3-oxopropoxy]methyl]-1,12,19,25-tetraoxo-16-oxa-13,20,24-tr iazanonacos-1-yl]-4-hydroxy-2-hydroxymethylpyrrolidine
tcttcccttgtcctctcgcga

SEQ ID NO: 650 - RNA, 21 nt, synthetic construct
  source 1..21: mol_type = other RNA
  modified_base 1: mod_base = OTHER; note = 2'-O-methyluridine-3'-phosphorothioate
  modified_base 2: mod_base = OTHER; note = 2'-O-methylcytidine-3'- phosphorothioate
  modified_base 3: mod_base = OTHER; note = 2'-O-methyluridine-3'-phosphate
  modified_base 4: mod_base = OTHER; note = 2'-O-methyluridine-3'-phosphate
  modified_base 5: mod_base = OTHER; note = 2'-O-methylcytidine-3'-phosphate
  modified_base 6: mod_base = OTHER; note = 2'-O-hexadecyl-cytidine-3'-phosphate
  modified_base 7: mod_base = OTHER; note = 2'-O-methylcytidine-3'-phosphate
  modified_base 8: mod_base = OTHER; note = 2'-O-methyluridine-3'-phosphate
  modified_base 9: mod_base = OTHER; note = 2'-fluorouridine-3'-phosphate
  modified_base 10: mod_base = OTHER; note = 2'-fluoroguanosine-3'-phosphate
  modified_base 11: mod_base = OTHER; note = 2'-fluorouridine-3'-phosphate
  modified_base 12: mod_base = OTHER; note = 2'-O-methylcytidine-3'-phosphate
  modified_base 13: mod_base = OTHER; note = 2'-O-methylcytidine-3'-phosphate
  modified_base 14: mod_base = OTHER; note = 2'-O-methyluridine-3'-phosphate
  modified_base 15: mod_base = OTHER; note = 2'-O-methylcytidine-3'-phosphate
  modified_base 16: mod_base = OTHER; note = 2'-O-methyluridine-3'-phosphate
  modified_base 17: mod_base = OTHER; note = 2'-O-methylcytidine-3'-phosphate
  modified_base 18: mod_base = OTHER; note = 2'-O-methylguanosine-3'-phosphate
  modified_base 19: mod_base = OTHER; note = 2'-O-methylcytidine-3'-phosphate
  modified_base 20: mod_base = OTHER; note = 2'-O-methylguanosine-3'-phosphate
  modified_base 21: mod_base = OTHER; note = 2'-O-methyladenosine-3'-phosphate N-[tris(GalNAc-alkyl)-amidodecanoyl)]-4-hydroxyprolinol Hyp-(GalNAc-alkyl)3 (2S,4R)-1-[29-[[2-(acetylamino)-2-deoxy-beta-D-galactopyran osyl]oxy]-14,14-bis[[3-[[3-[[5-[[2-(acetylamino)-2-deoxy-be ta-D-galactopyranosyl]oxy]-1-oxopentyl]amino]propyl]amino]- 3-oxopropoxy]methyl]-1,12,19,25-tetraoxo-16-oxa-13,20,24-tr iazanonacos-1-yl]-4-hydroxy-2-hydroxymethylpyrrolidine
tcttcccttgtcctctcgcga

SEQ ID NO: 651 - RNA, 21 nt, synthetic construct
  source 1..21: mol_type = other RNA
  modified_base 1: mod_base = OTHER; note = 2'-O-methylcytidine-3'- phosphorothioate
  modified_base 2: mod_base = OTHER; note = 2'-O-methyluridine-3'-phosphorothioate
  modified_base 3: mod_base = OTHER; note = 2'-O-methyluridine-3'-phosphate
  modified_base 4: mod_base = OTHER; note = 2'-O-methylcytidine-3'-phosphate
  modified_base 5: mod_base = OTHER; note = 2'-O-methylcytidine-3'-phosphate
  modified_base 6: mod_base = OTHER; note = 2'-O-hexadecyl-cytidine-3'-phosphate
  modified_base 7: mod_base = OTHER; note = 2'-fluorouridine-3'-phosphate
  modified_base 8: mod_base = OTHER; note = 2'-O-methyluridine-3'-phosphate
  modified_base 9: mod_base = OTHER; note = 2'-fluoroguanosine-3'-phosphate
  modified_base 10: mod_base = OTHER; note = 2'-fluorouridine-3'-phosphate
  modified_base 11: mod_base = OTHER; note = 2'-fluorocytidine-3'-phosphate
  modified_base 12: mod_base = OTHER; note = 2'-O-methylcytidine-3'-phosphate
  modified_base 13: mod_base = OTHER; note = 2'-O-methyluridine-3'-phosphate
  modified_base 14: mod_base = OTHER; note = 2'-O-methylcytidine-3'-phosphate
  modified_base 15: mod_base = OTHER; note = 2'-O-methyluridine-3'-phosphate
  modified_base 16: mod_base = OTHER; note = 2'-O-methylcytidine-3'-phosphate
  modified_base 17: mod_base = OTHER; note = 2'-O-methylguanosine-3'-phosphate
  modified_base 18: mod_base = OTHER; note = 2'-O-methylcytidine-3'-phosphate
  modified_base 19: mod_base = OTHER; note = 2'-O-methylguanosine-3'-phosphate
  modified_base 20: mod_base = OTHER; note = 2'-O-methyladenosine-3'-phosphate
  modified_base 21: mod_base = OTHER; note = 2'-O-methyladenosine-3'-phosphate N-[tris(GalNAc-alkyl)-amidodecanoyl)]-4-hydroxyprolinol Hyp-(GalNAc-alkyl)3 (2S,4R)-1-[29-[[2-(acetylamino)-2-deoxy-beta-D-galactopyran osyl]oxy]-14,14-bis[[3-[[3-[[5-[[2-(acetylamino)-2-deoxy-be ta-D-galactopyranosyl]oxy]-1-oxopentyl]amino]propyl]amino]- 3-oxopropoxy]methyl]-1,12,19,25-tetraoxo-16-oxa-13,20,24-tr iazanonacos-1-yl]-4-hydroxy-2-hydroxymethylpyrrolidine
cttcccttgtcctctcgcgaa

SEQ ID NO: 652 - RNA, 21 nt, synthetic construct
  source 1..21: mol_type = other RNA
  modified_base 1: mod_base = OTHER; note = 2'-O-methylcytidine-3'- phosphorothioate
  modified_base 2: mod_base = OTHER; note = 2'-O-methyluridine-3'-phosphorothioate
  modified_base 3: mod_base = OTHER; note = 2'-O-methyluridine-3'-phosphate
  modified_base 4: mod_base = OTHER; note = 2'-O-methylcytidine-3'-phosphate
  modified_base 5: mod_base = OTHER; note = 2'-O-methylcytidine-3'-phosphate
  modified_base 6: mod_base = OTHER; note = 2'-O-hexadecyl-cytidine-3'-phosphate
  modified_base 7: mod_base = OTHER; note = 2'-O-methyluridine-3'-phosphate
  modified_base 8: mod_base = OTHER; note = 2'-O-methyluridine-3'-phosphate
  modified_base 9: mod_base = OTHER; note = 2'-fluoroguanosine-3'-phosphate
  modified_base 10: mod_base = OTHER; note = 2'-fluorouridine-3'-phosphate
  modified_base 11: mod_base = OTHER; note = 2'-fluorocytidine-3'-phosphate
  modified_base 12: mod_base = OTHER; note = 2'-O-methylcytidine-3'-phosphate
  modified_base 13: mod_base = OTHER; note = 2'-O-methyluridine-3'-phosphate
  modified_base 14: mod_base = OTHER; note = 2'-O-methylcytidine-3'-phosphate
  modified_base 15: mod_base = OTHER; note = 2'-O-methyluridine-3'-phosphate
  modified_base 16: mod_base = OTHER; note = 2'-O-methylcytidine-3'-phosphate
  modified_base 17: mod_base = OTHER; note = 2'-O-methylguanosine-3'-phosphate
  modified_base 18: mod_base = OTHER; note = 2'-O-methylcytidine-3'-phosphate
  modified_base 19: mod_base = OTHER; note = 2'-O-methylguanosine-3'-phosphate
  modified_base 20: mod_base = OTHER; note = 2'-O-methyladenosine-3'-phosphate
  modified_base 21: mod_base = OTHER; note = 2'-O-methyladenosine-3'-phosphate N-[tris(GalNAc-alkyl)-amidodecanoyl)]-4-hydroxyprolinol Hyp-(GalNAc-alkyl)3 (2S,4R)-1-[29-[[2-(acetylamino)-2-deoxy-beta-D-galactopyran osyl]oxy]-14,14-bis[[3-[[3-[[5-[[2-(acetylamino)-2-deoxy-be ta-D-galactopyranosyl]oxy]-1-oxopentyl]amino]propyl]amino]- 3-oxopropoxy]methyl]-1,12,19,25-tetraoxo-16-oxa-13,20,24-tr iazanonacos-1-yl]-4-hydroxy-2-hydroxymethylpyrrolidine
cttcccttgtcctctcgcgaa

SEQ ID NO: 653 - RNA, 21 nt, synthetic construct
  source 1..21: mol_type = other RNA
  modified_base 1: mod_base = OTHER; note = 2'-O-methyluridine-3'-phosphorothioate
  modified_base 2: mod_base = OTHER; note = 2'-O-methyluridine-3'-phosphorothioate
  modified_base 3: mod_base = OTHER; note = 2'-O-methylcytidine-3'-phosphate
  modified_base 4: mod_base = OTHER; note = 2'-O-methylcytidine-3'-phosphate
  modified_base 5: mod_base = OTHER; note = 2'-O-methylcytidine-3'-phosphate
  modified_base 6: mod_base = OTHER; note = 2'-O-hexadecyl-uridine-3'-phosphate
  modified_base 7: mod_base = OTHER; note = 2'-fluorouridine-3'-phosphate
  modified_base 8: mod_base = OTHER; note = 2'-O-methylguanosine-3'-phosphate
  modified_base 9: mod_base = OTHER; note = 2'-fluorouridine-3'-phosphate
  modified_base 10: mod_base = OTHER; note = 2'-fluorocytidine-3'-phosphate
  modified_base 11: mod_base = OTHER; note = 2'-fluorocytidine-3'-phosphate
  modified_base 12: mod_base = OTHER; note = 2'-O-methyluridine-3'-phosphate
  modified_base 13: mod_base = OTHER; note = 2'-O-methylcytidine-3'-phosphate
  modified_base 14: mod_base = OTHER; note = 2'-O-methyluridine-3'-phosphate
  modified_base 15: mod_base = OTHER; note = 2'-O-methylcytidine-3'-phosphate
  modified_base 16: mod_base = OTHER; note = 2'-O-methylguanosine-3'-phosphate
  modified_base 17: mod_base = OTHER; note = 2'-O-methylcytidine-3'-phosphate
  modified_base 18: mod_base = OTHER; note = 2'-O-methylguanosine-3'-phosphate
  modified_base 19: mod_base = OTHER; note = 2'-O-methyladenosine-3'-phosphate
  modified_base 20: mod_base = OTHER; note = 2'-O-methylguanosine-3'-phosphate
  modified_base 21: mod_base = OTHER; note = 2'-O-methyladenosine-3'-phosphate N-[tris(GalNAc-alkyl)-amidodecanoyl)]-4-hydroxyprolinol Hyp-(GalNAc-alkyl)3 (2S,4R)-1-[29-[[2-(acetylamino)-2-deoxy-beta-D-galactopyran osyl]oxy]-14,14-bis[[3-[[3-[[5-[[2-(acetylamino)-2-deoxy-be ta-D-galactopyranosyl]oxy]-1-oxopentyl]amino]propyl]amino]- 3-oxopropoxy]methyl]-1,12,19,25-tetraoxo-16-oxa-13,20,24-tr iazanonacos-1-yl]-4-hydroxy-2-hydroxymethylpyrrolidine
ttcccttgtcctctcgcgaga

SEQ ID NO: 654 - RNA, 21 nt, synthetic construct
  source 1..21: mol_type = other RNA
  modified_base 1: mod_base = OTHER; note = 2'-O-methyluridine-3'-phosphorothioate
  modified_base 2: mod_base = OTHER; note = 2'-O-methyluridine-3'-phosphorothioate
  modified_base 3: mod_base = OTHER; note = 2'-O-methylcytidine-3'-phosphate
  modified_base 4: mod_base = OTHER; note = 2'-O-methylcytidine-3'-phosphate
  modified_base 5: mod_base = OTHER; note = 2'-O-methylcytidine-3'-phosphate
  modified_base 6: mod_base = OTHER; note = 2'-O-hexadecyl-uridine-3'-phosphate
  modified_base 7: mod_base = OTHER; note = 2'-O-methyluridine-3'-phosphate
  modified_base 8: mod_base = OTHER; note = 2'-O-methylguanosine-3'-phosphate
  modified_base 9: mod_base = OTHER; note = 2'-fluorouridine-3'-phosphate
  modified_base 10: mod_base = OTHER; note = 2'-fluorocytidine-3'-phosphate
  modified_base 11: mod_base = OTHER; note = 2'-fluorocytidine-3'-phosphate
  modified_base 12: mod_base = OTHER; note = 2'-O-methyluridine-3'-phosphate
  modified_base 13: mod_base = OTHER; note = 2'-O-methylcytidine-3'-phosphate
  modified_base 14: mod_base = OTHER; note = 2'-O-methyluridine-3'-phosphate
  modified_base 15: mod_base = OTHER; note = 2'-O-methylcytidine-3'-phosphate
  modified_base 16: mod_base = OTHER; note = 2'-O-methylguanosine-3'-phosphate
  modified_base 17: mod_base = OTHER; note = 2'-O-methylcytidine-3'-phosphate
  modified_base 18: mod_base = OTHER; note = 2'-O-methylguanosine-3'-phosphate
  modified_base 19: mod_base = OTHER; note = 2'-O-methyladenosine-3'-phosphate
  modified_base 20: mod_base = OTHER; note = 2'-O-methylguanosine-3'-phosphate
  modified_base 21: mod_base = OTHER; note = 2'-O-methyladenosine-3'-phosphate N-[tris(GalNAc-alkyl)-amidodecanoyl)]-4-hydroxyprolinol Hyp-(GalNAc-alkyl)3 (2S,4R)-1-[29-[[2-(acetylamino)-2-deoxy-beta-D-galactopyran osyl]oxy]-14,14-bis[[3-[[3-[[5-[[2-(acetylamino)-2-deoxy-be ta-D-galactopyranosyl]oxy]-1-oxopentyl]amino]propyl]amino]- 3-oxopropoxy]methyl]-1,12,19,25-tetraoxo-16-oxa-13,20,24-tr iazanonacos-1-yl]-4-hydroxy-2-hydroxymethylpyrrolidine
ttcccttgtcctctcgcgaga

SEQ ID NO: 655 - RNA, 21 nt, synthetic construct
  source 1..21: mol_type = other RNA
  modified_base 1: mod_base = OTHER; note = 2'-O-methyluridine-3'-phosphorothioate
  modified_base 2: mod_base = OTHER; note = 2'-O-methylcytidine-3'- phosphorothioate
  modified_base 3: mod_base = OTHER; note = 2'-O-methylcytidine-3'-phosphate
  modified_base 4: mod_base = OTHER; note = 2'-O-methylcytidine-3'-phosphate
  modified_base 5: mod_base = OTHER; note = 2'-O-methyluridine-3'-phosphate
  modified_base 6: mod_base = OTHER; note = 2'-O-hexadecyl-uridine-3'-phosphate
  modified_base 7: mod_base = OTHER; note = 2'-fluoroguanosine-3'-phosphate
  modified_base 8: mod_base = OTHER; note = 2'-O-methyluridine-3'-phosphate
  modified_base 9: mod_base = OTHER; note = 2'-fluorocytidine-3'-phosphate
  modified_base 10: mod_base = OTHER; note = 2'-fluorocytidine-3'-phosphate
  modified_base 11: mod_base = OTHER; note = 2'-fluorouridine-3'-phosphate
  modified_base 12: mod_base = OTHER; note = 2'-O-methylcytidine-3'-phosphate
  modified_base 13: mod_base = OTHER; note = 2'-O-methyluridine-3'-phosphate
  modified_base 14: mod_base = OTHER; note = 2'-O-methylcytidine-3'-phosphate
  modified_base 15: mod_base = OTHER; note = 2'-O-methylguanosine-3'-phosphate
  modified_base 16: mod_base = OTHER; note = 2'-O-methylcytidine-3'-phosphate
  modified_base 17: mod_base = OTHER; note = 2'-O-methylguanosine-3'-phosphate
  modified_base 18: mod_base = OTHER; note = 2'-O-methyladenosine-3'-phosphate
  modified_base 19: mod_base = OTHER; note = 2'-O-methylguanosine-3'-phosphate
  modified_base 20: mod_base = OTHER; note = 2'-O-methylguanosine-3'-phosphate
  modified_base 21: mod_base = OTHER; note = 2'-O-methyladenosine-3'-phosphate N-[tris(GalNAc-alkyl)-amidodecanoyl)]-4-hydroxyprolinol Hyp-(GalNAc-alkyl)3 (2S,4R)-1-[29-[[2-(acetylamino)-2-deoxy-beta-D-galactopyran osyl]oxy]-14,14-bis[[3-[[3-[[5-[[2-(acetylamino)-2-deoxy-be ta-D-galactopyranosyl]oxy]-1-oxopentyl]amino]propyl]amino]- 3-oxopropoxy]methyl]-1,12,19,25-tetraoxo-16-oxa-13,20,24-tr iazanonacos-1-yl]-4-hydroxy-2-hydroxymethylpyrrolidine
tcccttgtcctctcgcgagga

SEQ ID NO: 656 - RNA, 21 nt, synthetic construct
  source 1..21: mol_type = other RNA
  modified_base 1: mod_base = OTHER; note = 2'-O-methyluridine-3'-phosphorothioate
  modified_base 2: mod_base = OTHER; note = 2'-O-methylcytidine-3'- phosphorothioate
  modified_base 3: mod_base = OTHER; note = 2'-O-methylcytidine-3'-phosphate
  modified_base 4: mod_base = OTHER; note = 2'-O-methylcytidine-3'-phosphate
  modified_base 5: mod_base = OTHER; note = 2'-O-methyluridine-3'-phosphate
  modified_base 6: mod_base = OTHER; note = 2'-O-hexadecyl-uridine-3'-phosphate
  modified_base 7: mod_base = OTHER; note = 2'-O-methylguanosine-3'-phosphate
  modified_base 8: mod_base = OTHER; note = 2'-O-methyluridine-3'-phosphate
  modified_base 9: mod_base = OTHER; note = 2'-fluorocytidine-3'-phosphate
  modified_base 10: mod_base = OTHER; note = 2'-fluorocytidine-3'-phosphate
  modified_base 11: mod_base = OTHER; note = 2'-fluorouridine-3'-phosphate
  modified_base 12: mod_base = OTHER; note = 2'-O-methylcytidine-3'-phosphate
  modified_base 13: mod_base = OTHER; note = 2'-O-methyluridine-3'-phosphate
  modified_base 14: mod_base = OTHER; note = 2'-O-methylcytidine-3'-phosphate
  modified_base 15: mod_base = OTHER; note = 2'-O-methylguanosine-3'-phosphate
  modified_base 16: mod_base = OTHER; note = 2'-O-methylcytidine-3'-phosphate
  modified_base 17: mod_base = OTHER; note = 2'-O-methylguanosine-3'-phosphate
  modified_base 18: mod_base = OTHER; note = 2'-O-methyladenosine-3'-phosphate
  modified_base 19: mod_base = OTHER; note = 2'-O-methylguanosine-3'-phosphate
  modified_base 20: mod_base = OTHER; note = 2'-O-methylguanosine-3'-phosphate
  modified_base 21: mod_base = OTHER; note = 2'-O-methyladenosine-3'-phosphate N-[tris(GalNAc-alkyl)-amidodecanoyl)]-4-hydroxyprolinol Hyp-(GalNAc-alkyl)3 (2S,4R)-1-[29-[[2-(acetylamino)-2-deoxy-beta-D-galactopyran osyl]oxy]-14,14-bis[[3-[[3-[[5-[[2-(acetylamino)-2-deoxy-be ta-D-galactopyranosyl]oxy]-1-oxopentyl]amino]propyl]amino]- 3-oxopropoxy]methyl]-1,12,19,25-tetraoxo-16-oxa-13,20,24-tr iazanonacos-1-yl]-4-hydroxy-2-hydroxymethylpyrrolidine
tcccttgtcctctcgcgagga

SEQ ID NO: 657 - RNA, 21 nt, synthetic construct
  source 1..21: mol_type = other RNA
  modified_base 1: mod_base = OTHER; note = 2'-O-methylcytidine-3'- phosphorothioate
  modified_base 2: mod_base = OTHER; note = 2'-O-methylcytidine-3'- phosphorothioate
  modified_base 3: mod_base = OTHER; note = 2'-O-methylcytidine-3'-phosphate
  modified_base 4: mod_base = OTHER; note = 2'-O-methyluridine-3'-phosphate
  modified_base 5: mod_base = OTHER; note = 2'-O-methyluridine-3'-phosphate
  modified_base 6: mod_base = OTHER; note = 2'-O-hexadecyl-guanosine-3'-phosphate
  modified_base 7: mod_base = OTHER; note = 2'-fluorouridine-3'-phosphate
  modified_base 8: mod_base = OTHER; note = 2'-O-methylcytidine-3'-phosphate
  modified_base 9: mod_base = OTHER; note = 2'-fluorocytidine-3'-phosphate
  modified_base 10: mod_base = OTHER; note = 2'-fluorouridine-3'-phosphate
  modified_base 11: mod_base = OTHER; note = 2'-fluorocytidine-3'-phosphate
  modified_base 12: mod_base = OTHER; note = 2'-O-methyluridine-3'-phosphate
  modified_base 13: mod_base = OTHER; note = 2'-O-methylcytidine-3'-phosphate
  modified_base 14: mod_base = OTHER; note = 2'-O-methylguanosine-3'-phosphate
  modified_base 15: mod_base = OTHER; note = 2'-O-methylcytidine-3'-phosphate
  modified_base 16: mod_base = OTHER; note = 2'-O-methylguanosine-3'-phosphate
  modified_base 17: mod_base = OTHER; note = 2'-O-methyladenosine-3'-phosphate
  modified_base 18: mod_base = OTHER; note = 2'-O-methylguanosine-3'-phosphate
  modified_base 19: mod_base = OTHER; note = 2'-O-methylguanosine-3'-phosphate
  modified_base 20: mod_base = OTHER; note = 2'-O-methylguanosine-3'-phosphate
  modified_base 21: mod_base = OTHER; note = 2'-O-methyladenosine-3'-phosphate N-[tris(GalNAc-alkyl)-amidodecanoyl)]-4-hydroxyprolinol Hyp-(GalNAc-alkyl)3 (2S,4R)-1-[29-[[2-(acetylamino)-2-deoxy-beta-D-galactopyran osyl]oxy]-14,14-bis[[3-[[3-[[5-[[2-(acetylamino)-2-deoxy-be ta-D-galactopyranosyl]oxy]-1-oxopentyl]amino]propyl]amino]- 3-oxopropoxy]methyl]-1,12,19,25-tetraoxo-16-oxa-13,20,24-tr iazanonacos-1-yl]-4-hydroxy-2-hydroxymethylpyrrolidine
cccttgtcctctcgcgaggga

SEQ ID NO: 658 - RNA, 21 nt, synthetic construct
  source 1..21: mol_type = other RNA
  modified_base 1: mod_base = OTHER; note = 2'-O-methylcytidine-3'- phosphorothioate
  modified_base 2: mod_base = OTHER; note = 2'-O-methylcytidine-3'- phosphorothioate
  modified_base 3: mod_base = OTHER; note = 2'-O-methylcytidine-3'-phosphate
  modified_base 4: mod_base = OTHER; note = 2'-O-methyluridine-3'-phosphate
  modified_base 5: mod_base = OTHER; note = 2'-O-methyluridine-3'-phosphate
  modified_base 6: mod_base = OTHER; note = 2'-O-hexadecyl-guanosine-3'-phosphate
  modified_base 7: mod_base = OTHER; note = 2'-O-methyluridine-3'-phosphate
  modified_base 8: mod_base = OTHER; note = 2'-O-methylcytidine-3'-phosphate
  modified_base 9: mod_base = OTHER; note = 2'-fluorocytidine-3'-phosphate
  modified_base 10: mod_base = OTHER; note = 2'-fluorouridine-3'-phosphate
  modified_base 11: mod_base = OTHER; note = 2'-fluorocytidine-3'-phosphate
  modified_base 12: mod_base = OTHER; note = 2'-O-methyluridine-3'-phosphate
  modified_base 13: mod_base = OTHER; note = 2'-O-methylcytidine-3'-phosphate
  modified_base 14: mod_base = OTHER; note = 2'-O-methylguanosine-3'-phosphate
  modified_base 15: mod_base = OTHER; note = 2'-O-methylcytidine-3'-phosphate
  modified_base 16: mod_base = OTHER; note = 2'-O-methylguanosine-3'-phosphate
  modified_base 17: mod_base = OTHER; note = 2'-O-methyladenosine-3'-phosphate
  modified_base 18: mod_base = OTHER; note = 2'-O-methylguanosine-3'-phosphate
  modified_base 19: mod_base = OTHER; note = 2'-O-methylguanosine-3'-phosphate
  modified_base 20: mod_base = OTHER; note = 2'-O-methylguanosine-3'-phosphate
  modified_base 21: mod_base = OTHER; note = 2'-O-methyladenosine-3'-phosphate N-[tris(GalNAc-alkyl)-amidodecanoyl)]-4-hydroxyprolinol Hyp-(GalNAc-alkyl)3 (2S,4R)-1-[29-[[2-(acetylamino)-2-deoxy-beta-D-galactopyran osyl]oxy]-14,14-bis[[3-[[3-[[5-[[2-(acetylamino)-2-deoxy-be ta-D-galactopyranosyl]oxy]-1-oxopentyl]amino]propyl]amino]- 3-oxopropoxy]methyl]-1,12,19,25-tetraoxo-16-oxa-13,20,24-tr iazanonacos-1-yl]-4-hydroxy-2-hydroxymethylpyrrolidine
cccttgtcctctcgcgaggga

SEQ ID NO: 659 - RNA, 21 nt, synthetic construct
  source 1..21: mol_type = other RNA
  modified_base 1: mod_base = OTHER; note = 2'-O-methylcytidine-3'- phosphorothioate
  modified_base 2: mod_base = OTHER; note = 2'-O-methylcytidine-3'- phosphorothioate
  modified_base 3: mod_base = OTHER; note = 2'-O-methyluridine-3'-phosphate
  modified_base 4: mod_base = OTHER; note = 2'-O-methylguanosine-3'-phosphate
  modified_base 5: mod_base = OTHER; note = 2'-O-methyluridine-3'-phosphate
  modified_base 6: mod_base = OTHER; note = 2'-O-hexadecyl-cytidine-3'-phosphate
  modified_base 7: mod_base = OTHER; note = 2'-fluorocytidine-3'-phosphate
  modified_base 8: mod_base = OTHER; note = 2'-O-methyluridine-3'-phosphate
  modified_base 9: mod_base = OTHER; note = 2'-fluoroguanosine-3'-phosphate
  modified_base 10: mod_base = OTHER; note = 2'-fluoroadenosine-3'-phosphate
  modified_base 11: mod_base = OTHER; note = 2'-fluoroadenosine-3'-phosphate
  modified_base 12: mod_base = OTHER; note = 2'-O-methyluridine-3'-phosphate
  modified_base 13: mod_base = OTHER; note = 2'-O-methyluridine-3'-phosphate
  modified_base 14: mod_base = OTHER; note = 2'-O-methylcytidine-3'-phosphate
  modified_base 15: mod_base = OTHER; note = 2'-O-methyladenosine-3'-phosphate
  modified_base 16: mod_base = OTHER; note = 2'-O-methylcytidine-3'-phosphate
  modified_base 17: mod_base = OTHER; note = 2'-O-methylcytidine-3'-phosphate
  modified_base 18: mod_base = OTHER; note = 2'-O-methylguanosine-3'-phosphate
  modified_base 19: mod_base = OTHER; note = 2'-O-methyladenosine-3'-phosphate
  modified_base 20: mod_base = OTHER; note = 2'-O-methylguanosine-3'-phosphate
  modified_base 21: mod_base = OTHER; note = 2'-O-methyladenosine-3'-phosphate N-[tris(GalNAc-alkyl)-amidodecanoyl)]-4-hydroxyprolinol Hyp-(GalNAc-alkyl)3 (2S,4R)-1-[29-[[2-(acetylamino)-2-deoxy-beta-D-galactopyran osyl]oxy]-14,14-bis[[3-[[3-[[5-[[2-(acetylamino)-2-deoxy-be ta-D-galactopyranosyl]oxy]-1-oxopentyl]amino]propyl]amino]- 3-oxopropoxy]methyl]-1,12,19,25-tetraoxo-16-oxa-13,20,24-tr iazanonacos-1-yl]-4-hydroxy-2-hydroxymethylpyrrolidine
cctgtcctgaattcaccgaga

SEQ ID NO: 660 - RNA, 21 nt, synthetic construct
  source 1..21: mol_type = other RNA
  modified_base 1: mod_base = OTHER; note = 2'-O-methylcytidine-3'- phosphorothioate
  modified_base 2: mod_base = OTHER; note = 2'-O-methylcytidine-3'- phosphorothioate
  modified_base 3: mod_base = OTHER; note = 2'-O-methyluridine-3'-phosphate
  modified_base 4: mod_base = OTHER; note = 2'-O-methylguanosine-3'-phosphate
  modified_base 5: mod_base = OTHER; note = 2'-O-methyluridine-3'-phosphate
  modified_base 6: mod_base = OTHER; note = 2'-O-hexadecyl-cytidine-3'-phosphate
  modified_base 7: mod_base = OTHER; note = 2'-O-methylcytidine-3'-phosphate
  modified_base 8: mod_base = OTHER; note = 2'-O-methyluridine-3'-phosphate
  modified_base 9: mod_base = OTHER; note = 2'-fluoroguanosine-3'-phosphate
  modified_base 10: mod_base = OTHER; note = 2'-fluoroadenosine-3'-phosphate
  modified_base 11: mod_base = OTHER; note = 2'-fluoroadenosine-3'-phosphate
  modified_base 12: mod_base = OTHER; note = 2'-O-methyluridine-3'-phosphate
  modified_base 13: mod_base = OTHER; note = 2'-O-methyluridine-3'-phosphate
  modified_base 14: mod_base = OTHER; note = 2'-O-methylcytidine-3'-phosphate
  modified_base 15: mod_base = OTHER; note = 2'-O-methyladenosine-3'-phosphate
  modified_base 16: mod_base = OTHER; note = 2'-O-methylcytidine-3'-phosphate
  modified_base 17: mod_base = OTHER; note = 2'-O-methylcytidine-3'-phosphate
  modified_base 18: mod_base = OTHER; note = 2'-O-methylguanosine-3'-phosphate
  modified_base 19: mod_base = OTHER; note = 2'-O-methyladenosine-3'-phosphate
  modified_base 20: mod_base = OTHER; note = 2'-O-methylguanosine-3'-phosphate
  modified_base 21: mod_base = OTHER; note = 2'-O-methyladenosine-3'-phosphate N-[tris(GalNAc-alkyl)-amidodecanoyl)]-4-hydroxyprolinol Hyp-(GalNAc-alkyl)3 (2S,4R)-1-[29-[[2-(acetylamino)-2-deoxy-beta-D-galactopyran osyl]oxy]-14,14-bis[[3-[[3-[[5-[[2-(acetylamino)-2-deoxy-be ta-D-galactopyranosyl]oxy]-1-oxopentyl]amino]propyl]amino]- 3-oxopropoxy]methyl]-1,12,19,25-tetraoxo-16-oxa-13,20,24-tr iazanonacos-1-yl]-4-hydroxy-2-hydroxymethylpyrrolidine
cctgtcctgaattcaccgaga

SEQ ID NO: 661 - RNA, 21 nt, synthetic construct
  source 1..21: mol_type = other RNA
  modified_base 1: mod_base = OTHER; note = 2'-O-methylcytidine-3'- phosphorothioate
  modified_base 2: mod_base = OTHER; note = 2'-O-methyluridine-3'-phosphorothioate
  modified_base 3: mod_base = OTHER; note = 2'-O-methylguanosine-3'-phosphate
  modified_base 4: mod_base = OTHER; note = 2'-O-methyluridine-3'-phosphate
  modified_base 5: mod_base = OTHER; note = 2'-O-methylcytidine-3'-phosphate
  modified_base 6: mod_base = OTHER; note = 2'-O-hexadecyl-cytidine-3'-phosphate
  modified_base 7: mod_base = OTHER; note = 2'-fluorouridine-3'-phosphate
  modified_base 8: mod_base = OTHER; note = 2'-O-methylguanosine-3'-phosphate
  modified_base 9: mod_base = OTHER; note = 2'-fluoroadenosine-3'-phosphate
  modified_base 10: mod_base = OTHER; note = 2'-fluoroadenosine-3'-phosphate
  modified_base 11: mod_base = OTHER; note = 2'-fluorouridine-3'-phosphate
  modified_base 12: mod_base = OTHER; note = 2'-O-methyluridine-3'-phosphate
  modified_base 13: mod_base = OTHER; note = 2'-O-methylcytidine-3'-phosphate
  modified_base 14: mod_base = OTHER; note = 2'-O-methyladenosine-3'-phosphate
  modified_base 15: mod_base = OTHER; note = 2'-O-methylcytidine-3'-phosphate
  modified_base 16: mod_base = OTHER; note = 2'-O-methylcytidine-3'-phosphate
  modified_base 17: mod_base = OTHER; note = 2'-O-methylguanosine-3'-phosphate
  modified_base 18: mod_base = OTHER; note = 2'-O-methyladenosine-3'-phosphate
  modified_base 19: mod_base = OTHER; note = 2'-O-methylguanosine-3'-phosphate
  modified_base 20: mod_base = OTHER; note = 2'-O-methylguanosine-3'-phosphate
  modified_base 21: mod_base = OTHER; note = 2'-O-methyladenosine-3'-phosphate N-[tris(GalNAc-alkyl)-amidodecanoyl)]-4-hydroxyprolinol Hyp-(GalNAc-alkyl)3 (2S,4R)-1-[29-[[2-(acetylamino)-2-deoxy-beta-D-galactopyran osyl]oxy]-14,14-bis[[3-[[3-[[5-[[2-(acetylamino)-2-deoxy-be ta-D-galactopyranosyl]oxy]-1-oxopentyl]amino]propyl]amino]- 3-oxopropoxy]methyl]-1,12,19,25-tetraoxo-16-oxa-13,20,24-tr iazanonacos-1-yl]-4-hydroxy-2-hydroxymethylpyrrolidine
ctgtcctgaattcaccgagga

SEQ ID NO: 662 - RNA, 21 nt, synthetic construct
  source 1..21: mol_type = other RNA
  modified_base 1: mod_base = OTHER; note = 2'-O-methylcytidine-3'- phosphorothioate
  modified_base 2: mod_base = OTHER; note = 2'-O-methyluridine-3'-phosphorothioate
  modified_base 3: mod_base = OTHER; note = 2'-O-methylguanosine-3'-phosphate
  modified_base 4: mod_base = OTHER; note = 2'-O-methyluridine-3'-phosphate
  modified_base 5: mod_base = OTHER; note = 2'-O-methylcytidine-3'-phosphate
  modified_base 6: mod_base = OTHER; note = 2'-O-hexadecyl-cytidine-3'-phosphate
  modified_base 7: mod_base = OTHER; note = 2'-O-methyluridine-3'-phosphate
  modified_base 8: mod_base = OTHER; note = 2'-O-methylguanosine-3'-phosphate
  modified_base 9: mod_base = OTHER; note = 2'-fluoroadenosine-3'-phosphate
  modified_base 10: mod_base = OTHER; note = 2'-fluoroadenosine-3'-phosphate
  modified_base 11: mod_base = OTHER; note = 2'-fluorouridine-3'-phosphate
  modified_base 12: mod_base = OTHER; note = 2'-O-methyluridine-3'-phosphate
  modified_base 13: mod_base = OTHER; note = 2'-O-methylcytidine-3'-phosphate
  modified_base 14: mod_base = OTHER; note = 2'-O-methyladenosine-3'-phosphate
  modified_base 15: mod_base = OTHER; note = 2'-O-methylcytidine-3'-phosphate
  modified_base 16: mod_base = OTHER; note = 2'-O-methylcytidine-3'-phosphate
  modified_base 17: mod_base = OTHER; note = 2'-O-methylguanosine-3'-phosphate
  modified_base 18: mod_base = OTHER; note = 2'-O-methyladenosine-3'-phosphate
  modified_base 19: mod_base = OTHER; note = 2'-O-methylguanosine-3'-phosphate
  modified_base 20: mod_base = OTHER; note = 2'-O-methylguanosine-3'-phosphate
  modified_base 21: mod_base = OTHER; note = 2'-O-methyladenosine-3'-phosphate N-[tris(GalNAc-alkyl)-amidodecanoyl)]-4-hydroxyprolinol Hyp-(GalNAc-alkyl)3 (2S,4R)-1-[29-[[2-(acetylamino)-2-deoxy-beta-D-galactopyran osyl]oxy]-14,14-bis[[3-[[3-[[5-[[2-(acetylamino)-2-deoxy-be ta-D-galactopyranosyl]oxy]-1-oxopentyl]amino]propyl]amino]- 3-oxopropoxy]methyl]-1,12,19,25-tetraoxo-16-oxa-13,20,24-tr iazanonacos-1-yl]-4-hydroxy-2-hydroxymethylpyrrolidine
ctgtcctgaattcaccgagga

SEQ ID NO: 663 - RNA, 21 nt, synthetic construct
  source 1..21: mol_type = other RNA
  modified_base 1: mod_base = OTHER; note = 2'-O-methyluridine-3'-phosphorothioate
  modified_base 2: mod_base = OTHER; note = 2'-O-methylguanosine-3'- phosphorothioate
  modified_base 3: mod_base = OTHER; note = 2'-O-methyluridine-3'-phosphate
  modified_base 4: mod_base = OTHER; note = 2'-O-methylcytidine-3'-phosphate
  modified_base 5: mod_base = OTHER; note = 2'-O-methylcytidine-3'-phosphate
  modified_base 6: mod_base = OTHER; note = 2'-O-hexadecyl-uridine-3'-phosphate
  modified_base 7: mod_base = OTHER; note = 2'-fluoroguanosine-3'-phosphate
  modified_base 8: mod_base = OTHER; note = 2'-O-methyladenosine-3'-phosphate
  modified_base 9: mod_base = OTHER; note = 2'-fluoroadenosine-3'-phosphate
  modified_base 10: mod_base = OTHER; note = 2'-fluorouridine-3'-phosphate
  modified_base 11: mod_base = OTHER; note = 2'-fluorouridine-3'-phosphate
  modified_base 12: mod_base = OTHER; note = 2'-O-methylcytidine-3'-phosphate
  modified_base 13: mod_base = OTHER; note = 2'-O-methyladenosine-3'-phosphate
  modified_base 14: mod_base = OTHER; note = 2'-O-methylcytidine-3'-phosphate
  modified_base 15: mod_base = OTHER; note = 2'-O-methylcytidine-3'-phosphate
  modified_base 16: mod_base = OTHER; note = 2'-O-methylguanosine-3'-phosphate
  modified_base 17: mod_base = OTHER; note = 2'-O-methyladenosine-3'-phosphate
  modified_base 18: mod_base = OTHER; note = 2'-O-methylguanosine-3'-phosphate
  modified_base 19: mod_base = OTHER; note = 2'-O-methylguanosine-3'-phosphate
  modified_base 20: mod_base = OTHER; note = 2'-O-methylguanosine-3'-phosphate
  modified_base 21: mod_base = OTHER; note = 2'-O-methyladenosine-3'-phosphate N-[tris(GalNAc-alkyl)-amidodecanoyl)]-4-hydroxyprolinol Hyp-(GalNAc-alkyl)3 (2S,4R)-1-[29-[[2-(acetylamino)-2-deoxy-beta-D-galactopyran osyl]oxy]-14,14-bis[[3-[[3-[[5-[[2-(acetylamino)-2-deoxy-be ta-D-galactopyranosyl]oxy]-1-oxopentyl]amino]propyl]amino]- 3-oxopropoxy]methyl]-1,12,19,25-tetraoxo-16-oxa-13,20,24-tr iazanonacos-1-yl]-4-hydroxy-2-hydroxymethylpyrrolidine
tgtcctgaattcaccgaggga

SEQ ID NO: 664 - RNA, 21 nt, synthetic construct
  source 1..21: mol_type = other RNA
  modified_base 1: mod_base = OTHER; note = 2'-O-methyluridine-3'-phosphorothioate
  modified_base 2: mod_base = OTHER; note = 2'-O-methylguanosine-3'- phosphorothioate
  modified_base 3: mod_base = OTHER; note = 2'-O-methyluridine-3'-phosphate
  modified_base 4: mod_base = OTHER; note = 2'-O-methylcytidine-3'-phosphate
  modified_base 5: mod_base = OTHER; note = 2'-O-methylcytidine-3'-phosphate
  modified_base 6: mod_base = OTHER; note = 2'-O-hexadecyl-uridine-3'-phosphate
  modified_base 7: mod_base = OTHER; note = 2'-O-methylguanosine-3'-phosphate
  modified_base 8: mod_base = OTHER; note = 2'-O-methyladenosine-3'-phosphate
  modified_base 9: mod_base = OTHER; note = 2'-fluoroadenosine-3'-phosphate
  modified_base 10: mod_base = OTHER; note = 2'-fluorouridine-3'-phosphate
  modified_base 11: mod_base = OTHER; note = 2'-fluorouridine-3'-phosphate
  modified_base 12: mod_base = OTHER; note = 2'-O-methylcytidine-3'-phosphate
  modified_base 13: mod_base = OTHER; note = 2'-O-methyladenosine-3'-phosphate
  modified_base 14: mod_base = OTHER; note = 2'-O-methylcytidine-3'-phosphate
  modified_base 15: mod_base = OTHER; note = 2'-O-methylcytidine-3'-phosphate
  modified_base 16: mod_base = OTHER; note = 2'-O-methylguanosine-3'-phosphate
  modified_base 17: mod_base = OTHER; note = 2'-O-methyladenosine-3'-phosphate
  modified_base 18: mod_base = OTHER; note = 2'-O-methylguanosine-3'-phosphate
  modified_base 19: mod_base = OTHER; note = 2'-O-methylguanosine-3'-phosphate
  modified_base 20: mod_base = OTHER; note = 2'-O-methylguanosine-3'-phosphate
  modified_base 21: mod_base = OTHER; note = 2'-O-methyladenosine-3'-phosphate N-[tris(GalNAc-alkyl)-amidodecanoyl)]-4-hydroxyprolinol Hyp-(GalNAc-alkyl)3 (2S,4R)-1-[29-[[2-(acetylamino)-2-deoxy-beta-D-galactopyran osyl]oxy]-14,14-bis[[3-[[3-[[5-[[2-(acetylamino)-2-deoxy-be ta-D-galactopyranosyl]oxy]-1-oxopentyl]amino]propyl]amino]- 3-oxopropoxy]methyl]-1,12,19,25-tetraoxo-16-oxa-13,20,24-tr iazanonacos-1-yl]-4-hydroxy-2-hydroxymethylpyrrolidine
tgtcctgaattcaccgaggga

SEQ ID NO: 665 - RNA, 21 nt, synthetic construct
  source 1..21: mol_type = other RNA
  modified_base 1: mod_base = OTHER; note = 2'-O-methyluridine-3'-phosphorothioate
  modified_base 2: mod_base = OTHER; note = 2'-O-methylcytidine-3'- phosphorothioate
  modified_base 3: mod_base = OTHER; note = 2'-O-methylguanosine-3'-phosphate
  modified_base 4: mod_base = OTHER; note = 2'-O-methylcytidine-3'-phosphate
  modified_base 5: mod_base = OTHER; note = 2'-O-methylcytidine-3'-phosphate
  modified_base 6: mod_base = OTHER; note = 2'-O-hexadecyl-cytidine-3'-phosphate
  modified_base 7: mod_base = OTHER; note = 2'-fluorouridine-3'-phosphate
  modified_base 8: mod_base = OTHER; note = 2'-O-methyluridine-3'-phosphate
  modified_base 9: mod_base = OTHER; note = 2'-fluorocytidine-3'-phosphate
  modified_base 10: mod_base = OTHER; note = 2'-fluoroguanosine-3'-phosphate
  modified_base 11: mod_base = OTHER; note = 2'-fluorocytidine-3'-phosphate
  modified_base 12: mod_base = OTHER; note = 2'-O-methyladenosine-3'-phosphate
  modified_base 13: mod_base = OTHER; note = 2'-O-methylguanosine-3'-phosphate
  modified_base 14: mod_base = OTHER; note = 2'-O-methylguanosine-3'-phosphate
  modified_base 15: mod_base = OTHER; note = 2'-O-methyladenosine-3'-phosphate
  modified_base 16: mod_base = OTHER; note = 2'-O-methyluridine-3'-phosphate
  modified_base 17: mod_base = OTHER; note = 2'-O-methylguanosine-3'-phosphate
  modified_base 18: mod_base = OTHER; note = 2'-O-methylcytidine-3'-phosphate
  modified_base 19: mod_base = OTHER; note = 2'-O-methylguanosine-3'-phosphate
  modified_base 20: mod_base = OTHER; note = 2'-O-methyladenosine-3'-phosphate
  modified_base 21: mod_base = OTHER; note = 2'-O-methyladenosine-3'-phosphate N-[tris(GalNAc-alkyl)-amidodecanoyl)]-4-hydroxyprolinol Hyp-(GalNAc-alkyl)3 (2S,4R)-1-[29-[[2-(acetylamino)-2-deoxy-beta-D-galactopyran osyl]oxy]-14,14-bis[[3-[[3-[[5-[[2-(acetylamino)-2-deoxy-be ta-D-galactopyranosyl]oxy]-1-oxopentyl]amino]propyl]amino]- 3-oxopropoxy]methyl]-1,12,19,25-tetraoxo-16-oxa-13,20,24-tr iazanonacos-1-yl]-4-hydroxy-2-hydroxymethylpyrrolidine
tcgcccttcgcaggatgcgaa

SEQ ID NO: 666 - RNA, 21 nt, synthetic construct
  source 1..21: mol_type = other RNA
  modified_base 1: mod_base = OTHER; note = 2'-O-methylcytidine-3'- phosphorothioate
  modified_base 2: mod_base = OTHER; note = 2'-O-methylguanosine-3'- phosphorothioate
  modified_base 3: mod_base = OTHER; note = 2'-O-methylcytidine-3'-phosphate
  modified_base 4: mod_base = OTHER; note = 2'-O-methylcytidine-3'-phosphate
  modified_base 5: mod_base = OTHER; note = 2'-O-methylcytidine-3'-phosphate
  modified_base 6: mod_base = OTHER; note = 2'-O-hexadecyl-uridine-3'-phosphate
  modified_base 7: mod_base = OTHER; note = 2'-fluorouridine-3'-phosphate
  modified_base 8: mod_base = OTHER; note = 2'-O-methylcytidine-3'-phosphate
  modified_base 9: mod_base = OTHER; note = 2'-fluoroguanosine-3'-phosphate
  modified_base 10: mod_base = OTHER; note = 2'-fluorocytidine-3'-phosphate
  modified_base 11: mod_base = OTHER; note = 2'-fluoroadenosine-3'-phosphate
  modified_base 12: mod_base = OTHER; note = 2'-O-methylguanosine-3'-phosphate
  modified_base 13: mod_base = OTHER; note = 2'-O-methylguanosine-3'-phosphate
  modified_base 14: mod_base = OTHER; note = 2'-O-methyladenosine-3'-phosphate
  modified_base 15: mod_base = OTHER; note = 2'-O-methyluridine-3'-phosphate
  modified_base 16: mod_base = OTHER; note = 2'-O-methylguanosine-3'-phosphate
  modified_base 17: mod_base = OTHER; note = 2'-O-methylcytidine-3'-phosphate
  modified_base 18: mod_base = OTHER; note = 2'-O-methylguanosine-3'-phosphate
  modified_base 19: mod_base = OTHER; note = 2'-O-methyladenosine-3'-phosphate
  modified_base 20: mod_base = OTHER; note = 2'-O-methyladenosine-3'-phosphate
  modified_base 21: mod_base = OTHER; note = 2'-O-methyladenosine-3'-phosphate N-[tris(GalNAc-alkyl)-amidodecanoyl)]-4-hydroxyprolinol Hyp-(GalNAc-alkyl)3 (2S,4R)-1-[29-[[2-(acetylamino)-2-deoxy-beta-D-galactopyran osyl]oxy]-14,14-bis[[3-[[3-[[5-[[2-(acetylamino)-2-deoxy-be ta-D-galactopyranosyl]oxy]-1-oxopentyl]amino]propyl]amino]- 3-oxopropoxy]methyl]-1,12,19,25-tetraoxo-16-oxa-13,20,24-tr iazanonacos-1-yl]-4-hydroxy-2-hydroxymethylpyrrolidine
cgcccttcgcaggatgcgaaa

SEQ ID NO: 667 - RNA, 21 nt, synthetic construct
  source 1..21: mol_type = other RNA
  modified_base 1: mod_base = OTHER; note = 2'-O-methylguanosine-3'- phosphorothioate
  modified_base 2: mod_base = OTHER; note = 2'-O-methylcytidine-3'- phosphorothioate
  modified_base 3: mod_base = OTHER; note = 2'-O-methylcytidine-3'-phosphate
  modified_base 4: mod_base = OTHER; note = 2'-O-methylcytidine-3'-phosphate
  modified_base 5: mod_base = OTHER; note = 2'-O-methyluridine-3'-phosphate
  modified_base 6: mod_base = OTHER; note = 2'-O-hexadecyl-uridine-3'-phosphate
  modified_base 7: mod_base = OTHER; note = 2'-fluorocytidine-3'-phosphate
  modified_base 8: mod_base = OTHER; note = 2'-O-methylguanosine-3'-phosphate
  modified_base 9: mod_base = OTHER; note = 2'-fluorocytidine-3'-phosphate
  modified_base 10: mod_base = OTHER; note = 2'-fluoroadenosine-3'-phosphate
  modified_base 11: mod_base = OTHER; note = 2'-fluoroguanosine-3'-phosphate
  modified_base 12: mod_base = OTHER; note = 2'-O-methylguanosine-3'-phosphate
  modified_base 13: mod_base = OTHER; note = 2'-O-methyladenosine-3'-phosphate
  modified_base 14: mod_base = OTHER; note = 2'-O-methyluridine-3'-phosphate
  modified_base 15: mod_base = OTHER; note = 2'-O-methylguanosine-3'-phosphate
  modified_base 16: mod_base = OTHER; note = 2'-O-methylcytidine-3'-phosphate
  modified_base 17: mod_base = OTHER; note = 2'-O-methylguanosine-3'-phosphate
  modified_base 18: mod_base = OTHER; note = 2'-O-methyladenosine-3'-phosphate
  modified_base 19: mod_base = OTHER; note = 2'-O-methyladenosine-3'-phosphate
  modified_base 20: mod_base = OTHER; note = 2'-O-methylguanosine-3'-phosphate
  modified_base 21: mod_base = OTHER; note = 2'-O-methyladenosine-3'-phosphate N-[tris(GalNAc-alkyl)-amidodecanoyl)]-4-hydroxyprolinol Hyp-(GalNAc-alkyl)3 (2S,4R)-1-[29-[[2-(acetylamino)-2-deoxy-beta-D-galactopyran osyl]oxy]-14,14-bis[[3-[[3-[[5-[[2-(acetylamino)-2-deoxy-be ta-D-galactopyranosyl]oxy]-1-oxopentyl]amino]propyl]amino]- 3-oxopropoxy]methyl]-1,12,19,25-tetraoxo-16-oxa-13,20,24-tr iazanonacos-1-yl]-4-hydroxy-2-hydroxymethylpyrrolidine
gcccttcgcaggatgcgaaga

SEQ ID NO: 668 - RNA, 21 nt, synthetic construct
  source 1..21: mol_type = other RNA
  modified_base 1: mod_base = OTHER; note = 2'-O-methylguanosine-3'- phosphorothioate
  modified_base 2: mod_base = OTHER; note = 2'-O-methylcytidine-3'- phosphorothioate
  modified_base 3: mod_base = OTHER; note = 2'-O-methylcytidine-3'-phosphate
  modified_base 4: mod_base = OTHER; note = 2'-O-methylcytidine-3'-phosphate
  modified_base 5: mod_base = OTHER; note = 2'-O-methyluridine-3'-phosphate
  modified_base 6: mod_base = OTHER; note = 2'-O-hexadecyl-uridine-3'-phosphate
  modified_base 7: mod_base = OTHER; note = 2'-O-methylcytidine-3'-phosphate
  modified_base 8: mod_base = OTHER; note = 2'-O-methylguanosine-3'-phosphate
  modified_base 9: mod_base = OTHER; note = 2'-fluorocytidine-3'-phosphate
  modified_base 10: mod_base = OTHER; note = 2'-fluoroadenosine-3'-phosphate
  modified_base 11: mod_base = OTHER; note = 2'-fluoroguanosine-3'-phosphate
  modified_base 12: mod_base = OTHER; note = 2'-O-methylguanosine-3'-phosphate
  modified_base 13: mod_base = OTHER; note = 2'-O-methyladenosine-3'-phosphate
  modified_base 14: mod_base = OTHER; note = 2'-O-methyluridine-3'-phosphate
  modified_base 15: mod_base = OTHER; note = 2'-O-methylguanosine-3'-phosphate
  modified_base 16: mod_base = OTHER; note = 2'-O-methylcytidine-3'-phosphate
  modified_base 17: mod_base = OTHER; note = 2'-O-methylguanosine-3'-phosphate
  modified_base 18: mod_base = OTHER; note = 2'-O-methyladenosine-3'-phosphate
  modified_base 19: mod_base = OTHER; note = 2'-O-methyladenosine-3'-phosphate
  modified_base 20: mod_base = OTHER; note = 2'-O-methylguanosine-3'-phosphate
  modified_base 21: mod_base = OTHER; note = 2'-O-methyladenosine-3'-phosphate N-[tris(GalNAc-alkyl)-amidodecanoyl)]-4-hydroxyprolinol Hyp-(GalNAc-alkyl)3 (2S,4R)-1-[29-[[2-(acetylamino)-2-deoxy-beta-D-galactopyran osyl]oxy]-14,14-bis[[3-[[3-[[5-[[2-(acetylamino)-2-deoxy-be ta-D-galactopyranosyl]oxy]-1-oxopentyl]amino]propyl]amino]- 3-oxopropoxy]methyl]-1,12,19,25-tetraoxo-16-oxa-13,20,24-tr iazanonacos-1-yl]-4-hydroxy-2-hydroxymethylpyrrolidine
gcccttcgcaggatgcgaaga

SEQ ID NO: 669 - RNA, 21 nt, synthetic construct
  source 1..21: mol_type = other RNA
  modified_base 1: mod_base = OTHER; note = 2'-O-methylcytidine-3'- phosphorothioate
  modified_base 2: mod_base = OTHER; note = 2'-O-methylcytidine-3'- phosphorothioate
  modified_base 3: mod_base = OTHER; note = 2'-O-methyluridine-3'-phosphate
  modified_base 4: mod_base = OTHER; note = 2'-O-methyluridine-3'-phosphate
  modified_base 5: mod_base = OTHER; note = 2'-O-methylcytidine-3'-phosphate
  modified_base 6: mod_base = OTHER; note = 2'-O-hexadecyl-guanosine-3'-phosphate
  modified_base 7: mod_base = OTHER; note = 2'-fluorocytidine-3'-phosphate
  modified_base 8: mod_base = OTHER; note = 2'-O-methyladenosine-3'-phosphate
  modified_base 9: mod_base = OTHER; note = 2'-fluoroguanosine-3'-phosphate
  modified_base 10: mod_base = OTHER; note = 2'-fluoroguanosine-3'-phosphate
  modified_base 11: mod_base = OTHER; note = 2'-fluoroadenosine-3'-phosphate
  modified_base 12: mod_base = OTHER; note = 2'-O-methyluridine-3'-phosphate
  modified_base 13: mod_base = OTHER; note = 2'-O-methylguanosine-3'-phosphate
  modified_base 14: mod_base = OTHER; note = 2'-O-methylcytidine-3'-phosphate
  modified_base 15: mod_base = OTHER; note = 2'-O-methylguanosine-3'-phosphate
  modified_base 16: mod_base = OTHER; note = 2'-O-methyladenosine-3'-phosphate
  modified_base 17: mod_base = OTHER; note = 2'-O-methyladenosine-3'-phosphate
  modified_base 18: mod_base = OTHER; note = 2'-O-methylguanosine-3'-phosphate
  modified_base 19: mod_base = OTHER; note = 2'-O-methyladenosine-3'-phosphate
  modified_base 20: mod_base = OTHER; note = 2'-O-methylguanosine-3'-phosphate
  modified_base 21: mod_base = OTHER; note = 2'-O-methyladenosine-3'-phosphate N-[tris(GalNAc-alkyl)-amidodecanoyl)]-4-hydroxyprolinol Hyp-(GalNAc-alkyl)3 (2S,4R)-1-[29-[[2-(acetylamino)-2-deoxy-beta-D-galactopyran osyl]oxy]-14,14-bis[[3-[[3-[[5-[[2-(acetylamino)-2-deoxy-be ta-D-galactopyranosyl]oxy]-1-oxopentyl]amino]propyl]amino]- 3-oxopropoxy]methyl]-1,12,19,25-tetraoxo-16-oxa-13,20,24-tr iazanonacos-1-yl]-4-hydroxy-2-hydroxymethylpyrrolidine
ccttcgcaggatgcgaagaga

SEQ ID NO: 670 - RNA, 21 nt, synthetic construct
  source 1..21: mol_type = other RNA
  modified_base 1: mod_base = OTHER; note = 2'-O-methylcytidine-3'- phosphorothioate
  modified_base 2: mod_base = OTHER; note = 2'-O-methylcytidine-3'- phosphorothioate
  modified_base 3: mod_base = OTHER; note = 2'-O-methyluridine-3'-phosphate
  modified_base 4: mod_base = OTHER; note = 2'-O-methyluridine-3'-phosphate
  modified_base 5: mod_base = OTHER; note = 2'-O-methylcytidine-3'-phosphate
  modified_base 6: mod_base = OTHER; note = 2'-O-hexadecyl-guanosine-3'-phosphate
  modified_base 7: mod_base = OTHER; note = 2'-O-methylcytidine-3'-phosphate
  modified_base 8: mod_base = OTHER; note = 2'-O-methyladenosine-3'-phosphate
  modified_base 9: mod_base = OTHER; note = 2'-fluoroguanosine-3'-phosphate
  modified_base 10: mod_base = OTHER; note = 2'-fluoroguanosine-3'-phosphate
  modified_base 11: mod_base = OTHER; note = 2'-fluoroadenosine-3'-phosphate
  modified_base 12: mod_base = OTHER; note = 2'-O-methyluridine-3'-phosphate
  modified_base 13: mod_base = OTHER; note = 2'-O-methylguanosine-3'-phosphate
  modified_base 14: mod_base = OTHER; note = 2'-O-methylcytidine-3'-phosphate
  modified_base 15: mod_base = OTHER; note = 2'-O-methylguanosine-3'-phosphate
  modified_base 16: mod_base = OTHER; note = 2'-O-methyladenosine-3'-phosphate
  modified_base 17: mod_base = OTHER; note = 2'-O-methyladenosine-3'-phosphate
  modified_base 18: mod_base = OTHER; note = 2'-O-methylguanosine-3'-phosphate
  modified_base 19: mod_base = OTHER; note = 2'-O-methyladenosine-3'-phosphate
  modified_base 20: mod_base = OTHER; note = 2'-O-methylguanosine-3'-phosphate
  modified_base 21: mod_base = OTHER; note = 2'-O-methyladenosine-3'-phosphate N-[tris(GalNAc-alkyl)-amidodecanoyl)]-4-hydroxyprolinol Hyp-(GalNAc-alkyl)3 (2S,4R)-1-[29-[[2-(acetylamino)-2-deoxy-beta-D-galactopyran osyl]oxy]-14,14-bis[[3-[[3-[[5-[[2-(acetylamino)-2-deoxy-be ta-D-galactopyranosyl]oxy]-1-oxopentyl]amino]propyl]amino]- 3-oxopropoxy]methyl]-1,12,19,25-tetraoxo-16-oxa-13,20,24-tr iazanonacos-1-yl]-4-hydroxy-2-hydroxymethylpyrrolidine
ccttcgcaggatgcgaagaga

SEQ ID NO: 671 - RNA, 21 nt, synthetic construct
  source 1..21: mol_type = other RNA
  modified_base 1: mod_base = OTHER; note = 2'-O-methylcytidine-3'- phosphorothioate
  modified_base 2: mod_base = OTHER; note = 2'-O-methyluridine-3'-phosphorothioate
  modified_base 3: mod_base = OTHER; note = 2'-O-methyluridine-3'-phosphate
  modified_base 4: mod_base = OTHER; note = 2'-O-methylcytidine-3'-phosphate
  modified_base 5: mod_base = OTHER; note = 2'-O-methylguanosine-3'-phosphate
  modified_base 6: mod_base = OTHER; note = 2'-O-hexadecyl-cytidine-3'-phosphate
  modified_base 7: mod_base = OTHER; note = 2'-fluoroadenosine-3'-phosphate
  modified_base 8: mod_base = OTHER; note = 2'-O-methylguanosine-3'-phosphate
  modified_base 9: mod_base = OTHER; note = 2'-fluoroguanosine-3'-phosphate
  modified_base 10: mod_base = OTHER; note = 2'-fluoroadenosine-3'-phosphate
  modified_base 11: mod_base = OTHER; note = 2'-fluorouridine-3'-phosphate
  modified_base 12: mod_base = OTHER; note = 2'-O-methylguanosine-3'-phosphate
  modified_base 13: mod_base = OTHER; note = 2'-O-methylcytidine-3'-phosphate
  modified_base 14: mod_base = OTHER; note = 2'-O-methylguanosine-3'-phosphate
  modified_base 15: mod_base = OTHER; note = 2'-O-methyladenosine-3'-phosphate
  modified_base 16: mod_base = OTHER; note = 2'-O-methyladenosine-3'-phosphate
  modified_base 17: mod_base = OTHER; note = 2'-O-methylguanosine-3'-phosphate
  modified_base 18: mod_base = OTHER; note = 2'-O-methyladenosine-3'-phosphate
  modified_base 19: mod_base = OTHER; note = 2'-O-methylguanosine-3'-phosphate
  modified_base 20: mod_base = OTHER; note = 2'-O-methyluridine-3'-phosphate
  modified_base 21: mod_base = OTHER; note = 2'-O-methyladenosine-3'-phosphate N-[tris(GalNAc-alkyl)-amidodecanoyl)]-4-hydroxyprolinol Hyp-(GalNAc-alkyl)3 (2S,4R)-1-[29-[[2-(acetylamino)-2-deoxy-beta-D-galactopyran osyl]oxy]-14,14-bis[[3-[[3-[[5-[[2-(acetylamino)-2-deoxy-be ta-D-galactopyranosyl]oxy]-1-oxopentyl]amino]propyl]amino]- 3-oxopropoxy]methyl]-1,12,19,25-tetraoxo-16-oxa-13,20,24-tr iazanonacos-1-yl]-4-hydroxy-2-hydroxymethylpyrrolidine
cttcgcaggatgcgaagagta

SEQ ID NO: 672 - RNA, 21 nt, synthetic construct
  source 1..21: mol_type = other RNA
  modified_base 1: mod_base = OTHER; note = 2'-O-methyluridine-3'-phosphorothioate
  modified_base 2: mod_base = OTHER; note = 2'-O-methyluridine-3'-phosphorothioate
  modified_base 3: mod_base = OTHER; note = 2'-O-methylcytidine-3'-phosphate
  modified_base 4: mod_base = OTHER; note = 2'-O-methylguanosine-3'-phosphate
  modified_base 5: mod_base = OTHER; note = 2'-O-methylcytidine-3'-phosphate
  modified_base 6: mod_base = OTHER; note = 2'-O-hexadecyl-adenosine-3'-phosphate
  modified_base 7: mod_base = OTHER; note = 2'-fluoroguanosine-3'-phosphate
  modified_base 8: mod_base = OTHER; note = 2'-O-methylguanosine-3'-phosphate
  modified_base 9: mod_base = OTHER; note = 2'-fluoroadenosine-3'-phosphate
  modified_base 10: mod_base = OTHER; note = 2'-fluorouridine-3'-phosphate
  modified_base 11: mod_base = OTHER; note = 2'-fluoroguanosine-3'-phosphate
  modified_base 12: mod_base = OTHER; note = 2'-O-methylcytidine-3'-phosphate
  modified_base 13: mod_base = OTHER; note = 2'-O-methylguanosine-3'-phosphate
  modified_base 14: mod_base = OTHER; note = 2'-O-methyladenosine-3'-phosphate
  modified_base 15: mod_base = OTHER; note = 2'-O-methyladenosine-3'-phosphate
  modified_base 16: mod_base = OTHER; note = 2'-O-methylguanosine-3'-phosphate
  modified_base 17: mod_base = OTHER; note = 2'-O-methyladenosine-3'-phosphate
  modified_base 18: mod_base = OTHER; note = 2'-O-methylguanosine-3'-phosphate
  modified_base 19: mod_base = OTHER; note = 2'-O-methyluridine-3'-phosphate
  modified_base 20: mod_base = OTHER; note = 2'-O-methyluridine-3'-phosphate
  modified_base 21: mod_base = OTHER; note = 2'-O-methyladenosine-3'-phosphate N-[tris(GalNAc-alkyl)-amidodecanoyl)]-4-hydroxyprolinol Hyp-(GalNAc-alkyl)3 (2S,4R)-1-[29-[[2-(acetylamino)-2-deoxy-beta-D-galactopyran osyl]oxy]-14,14-bis[[3-[[3-[[5-[[2-(acetylamino)-2-deoxy-be ta-D-galactopyranosyl]oxy]-1-oxopentyl]amino]propyl]amino]- 3-oxopropoxy]methyl]-1,12,19,25-tetraoxo-16-oxa-13,20,24-tr iazanonacos-1-yl]-4-hydroxy-2-hydroxymethylpyrrolidine
ttcgcaggatgcgaagagtta

SEQ ID NO: 673 - RNA, 21 nt, synthetic construct
  source 1..21: mol_type = other RNA
  modified_base 1: mod_base = OTHER; note = 2'-O-methyluridine-3'-phosphorothioate
  modified_base 2: mod_base = OTHER; note = 2'-O-methylcytidine-3'- phosphorothioate
  modified_base 3: mod_base = OTHER; note = 2'-O-methylguanosine-3'-phosphate
  modified_base 4: mod_base = OTHER; note = 2'-O-methylcytidine-3'-phosphate
  modified_base 5: mod_base = OTHER; note = 2'-O-methyladenosine-3'-phosphate
  modified_base 6: mod_base = OTHER; note = 2'-O-hexadecyl-guanosine-3'-phosphate
  modified_base 7: mod_base = OTHER; note = 2'-fluoroguanosine-3'-phosphate
  modified_base 8: mod_base = OTHER; note = 2'-O-methyladenosine-3'-phosphate
  modified_base 9: mod_base = OTHER; note = 2'-fluorouridine-3'-phosphate
  modified_base 10: mod_base = OTHER; note = 2'-fluoroguanosine-3'-phosphate
  modified_base 11: mod_base = OTHER; note = 2'-fluorocytidine-3'-phosphate
  modified_base 12: mod_base = OTHER; note = 2'-O-methylguanosine-3'-phosphate
  modified_base 13: mod_base = OTHER; note = 2'-O-methyladenosine-3'-phosphate
  modified_base 14: mod_base = OTHER; note = 2'-O-methyladenosine-3'-phosphate
  modified_base 15: mod_base = OTHER; note = 2'-O-methylguanosine-3'-phosphate
  modified_base 16: mod_base = OTHER; note = 2'-O-methyladenosine-3'-phosphate
  modified_base 17: mod_base = OTHER; note = 2'-O-methylguanosine-3'-phosphate
  modified_base 18: mod_base = OTHER; note = 2'-O-methyluridine-3'-phosphate
  modified_base 19: mod_base = OTHER; note = 2'-O-methyluridine-3'-phosphate
  modified_base 20: mod_base = OTHER; note = 2'-O-methylguanosine-3'-phosphate
  modified_base 21: mod_base = OTHER; note = 2'-O-methyladenosine-3'-phosphate N-[tris(GalNAc-alkyl)-amidodecanoyl)]-4-hydroxyprolinol Hyp-(GalNAc-alkyl)3 (2S,4R)-1-[29-[[2-(acetylamino)-2-deoxy-beta-D-galactopyran osyl]oxy]-14,14-bis[[3-[[3-[[5-[[2-(acetylamino)-2-deoxy-be ta-D-galactopyranosyl]oxy]-1-oxopentyl]amino]propyl]amino]- 3-oxopropoxy]methyl]-1,12,19,25-tetraoxo-16-oxa-13,20,24-tr iazanonacos-1-yl]-4-hydroxy-2-hydroxymethylpyrrolidine
tcgcaggatgcgaagagttga

SEQ ID NO: 674 - RNA, 21 nt, synthetic construct
  source 1..21: mol_type = other RNA
  modified_base 1: mod_base = OTHER; note = 2'-O-methyluridine-3'-phosphorothioate
  modified_base 2: mod_base = OTHER; note = 2'-O-methylcytidine-3'- phosphorothioate
  modified_base 3: mod_base = OTHER; note = 2'-O-methylguanosine-3'-phosphate
  modified_base 4: mod_base = OTHER; note = 2'-O-methylcytidine-3'-phosphate
  modified_base 5: mod_base = OTHER; note = 2'-O-methyladenosine-3'-phosphate
  modified_base 6: mod_base = OTHER; note = 2'-O-hexadecyl-guanosine-3'-phosphate
  modified_base 7: mod_base = OTHER; note = 2'-O-methylguanosine-3'-phosphate
  modified_base 8: mod_base = OTHER; note = 2'-O-methyladenosine-3'-phosphate
  modified_base 9: mod_base = OTHER; note = 2'-fluorouridine-3'-phosphate
  modified_base 10: mod_base = OTHER; note = 2'-fluoroguanosine-3'-phosphate
  modified_base 11: mod_base = OTHER; note = 2'-fluorocytidine-3'-phosphate
  modified_base 12: mod_base = OTHER; note = 2'-O-methylguanosine-3'-phosphate
  modified_base 13: mod_base = OTHER; note = 2'-O-methyladenosine-3'-phosphate
  modified_base 14: mod_base = OTHER; note = 2'-O-methyladenosine-3'-phosphate
  modified_base 15: mod_base = OTHER; note = 2'-O-methylguanosine-3'-phosphate
  modified_base 16: mod_base = OTHER; note = 2'-O-methyladenosine-3'-phosphate
  modified_base 17: mod_base = OTHER; note = 2'-O-methylguanosine-3'-phosphate
  modified_base 18: mod_base = OTHER; note = 2'-O-methyluridine-3'-phosphate
  modified_base 19: mod_base = OTHER; note = 2'-O-methyluridine-3'-phosphate
  modified_base 20: mod_base = OTHER; note = 2'-O-methylguanosine-3'-phosphate
  modified_base 21: mod_base = OTHER; note = 2'-O-methyladenosine-3'-phosphate N-[tris(GalNAc-alkyl)-amidodecanoyl)]-4-hydroxyprolinol Hyp-(GalNAc-alkyl)3 (2S,4R)-1-[29-[[2-(acetylamino)-2-deoxy-beta-D-galactopyran osyl]oxy]-14,14-bis[[3-[[3-[[5-[[2-(acetylamino)-2-deoxy-be ta-D-galactopyranosyl]oxy]-1-oxopentyl]amino]propyl]amino]- 3-oxopropoxy]methyl]-1,12,19,25-tetraoxo-16-oxa-13,20,24-tr iazanonacos-1-yl]-4-hydroxy-2-hydroxymethylpyrrolidine
tcgcaggatgcgaagagttga

SEQ ID NO: 675 - RNA, 21 nt, synthetic construct
  source 1..21: mol_type = other RNA
  modified_base 1: mod_base = OTHER; note = 2'-O-methylcytidine-3'- phosphorothioate
  modified_base 2: mod_base = OTHER; note = 2'-O-methylguanosine-3'- phosphorothioate
  modified_base 3: mod_base = OTHER; note = 2'-O-methylcytidine-3'-phosphate
  modified_base 4: mod_base = OTHER; note = 2'-O-methyladenosine-3'-phosphate
  modified_base 5: mod_base = OTHER; note = 2'-O-methylguanosine-3'-phosphate
  modified_base 6: mod_base = OTHER; note = 2'-O-hexadecyl-guanosine-3'-phosphate
  modified_base 7: mod_base = OTHER; note = 2'-fluoroadenosine-3'-phosphate
  modified_base 8: mod_base = OTHER; note = 2'-O-methyluridine-3'-phosphate
  modified_base 9: mod_base = OTHER; note = 2'-fluoroguanosine-3'-phosphate
  modified_base 10: mod_base = OTHER; note = 2'-fluorocytidine-3'-phosphate
  modified_base 11: mod_base = OTHER; note = 2'-fluoroguanosine-3'-phosphate
  modified_base 12: mod_base = OTHER; note = 2'-O-methyladenosine-3'-phosphate
  modified_base 13: mod_base = OTHER; note = 2'-O-methyladenosine-3'-phosphate
  modified_base 14: mod_base = OTHER; note = 2'-O-methylguanosine-3'-phosphate
  modified_base 15: mod_base = OTHER; note = 2'-O-methyladenosine-3'-phosphate
  modified_base 16: mod_base = OTHER; note = 2'-O-methylguanosine-3'-phosphate
  modified_base 17: mod_base = OTHER; note = 2'-O-methyluridine-3'-phosphate
  modified_base 18: mod_base = OTHER; note = 2'-O-methyluridine-3'-phosphate
  modified_base 19: mod_base = OTHER; note = 2'-O-methylguanosine-3'-phosphate
  modified_base 20: mod_base = OTHER; note = 2'-O-methylguanosine-3'-phosphate
  modified_base 21: mod_base = OTHER; note = 2'-O-methyladenosine-3'-phosphate N-[tris(GalNAc-alkyl)-amidodecanoyl)]-4-hydroxyprolinol Hyp-(GalNAc-alkyl)3 (2S,4R)-1-[29-[[2-(acetylamino)-2-deoxy-beta-D-galactopyran osyl]oxy]-14,14-bis[[3-[[3-[[5-[[2-(acetylamino)-2-deoxy-be ta-D-galactopyranosyl]oxy]-1-oxopentyl]amino]propyl]amino]- 3-oxopropoxy]methyl]-1,12,19,25-tetraoxo-16-oxa-13,20,24-tr iazanonacos-1-yl]-4-hydroxy-2-hydroxymethylpyrrolidine
cgcaggatgcgaagagttgga

SEQ ID NO: 676 - RNA, 21 nt, synthetic construct
  source 1..21: mol_type = other RNA
  modified_base 1: mod_base = OTHER; note = 2'-O-methylcytidine-3'- phosphorothioate
  modified_base 2: mod_base = OTHER; note = 2'-O-methylguanosine-3'- phosphorothioate
  modified_base 3: mod_base = OTHER; note = 2'-O-methylcytidine-3'-phosphate
  modified_base 4: mod_base = OTHER; note = 2'-O-methyladenosine-3'-phosphate
  modified_base 5: mod_base = OTHER; note = 2'-O-methylguanosine-3'-phosphate
  modified_base 6: mod_base = OTHER; note = 2'-O-hexadecyl-guanosine-3'-phosphate
  modified_base 7: mod_base = OTHER; note = 2'-O-methyladenosine-3'-phosphate
  modified_base 8: mod_base = OTHER; note = 2'-O-methyluridine-3'-phosphate
  modified_base 9: mod_base = OTHER; note = 2'-fluoroguanosine-3'-phosphate
  modified_base 10: mod_base = OTHER; note = 2'-fluorocytidine-3'-phosphate
  modified_base 11: mod_base = OTHER; note = 2'-fluoroguanosine-3'-phosphate
  modified_base 12: mod_base = OTHER; note = 2'-O-methyladenosine-3'-phosphate
  modified_base 13: mod_base = OTHER; note = 2'-O-methyladenosine-3'-phosphate
  modified_base 14: mod_base = OTHER; note = 2'-O-methylguanosine-3'-phosphate
  modified_base 15: mod_base = OTHER; note = 2'-O-methyladenosine-3'-phosphate
  modified_base 16: mod_base = OTHER; note = 2'-O-methylguanosine-3'-phosphate
  modified_base 17: mod_base = OTHER; note = 2'-O-methyluridine-3'-phosphate
  modified_base 18: mod_base = OTHER; note = 2'-O-methyluridine-3'-phosphate
  modified_base 19: mod_base = OTHER; note = 2'-O-methylguanosine-3'-phosphate
  modified_base 20: mod_base = OTHER; note = 2'-O-methylguanosine-3'-phosphate
  modified_base 21: mod_base = OTHER; note = 2'-O-methyladenosine-3'-phosphate N-[tris(GalNAc-alkyl)-amidodecanoyl)]-4-hydroxyprolinol Hyp-(GalNAc-alkyl)3 (2S,4R)-1-[29-[[2-(acetylamino)-2-deoxy-beta-D-galactopyran osyl]oxy]-14,14-bis[[3-[[3-[[5-[[2-(acetylamino)-2-deoxy-be ta-D-galactopyranosyl]oxy]-1-oxopentyl]amino]propyl]amino]- 3-oxopropoxy]methyl]-1,12,19,25-tetraoxo-16-oxa-13,20,24-tr iazanonacos-1-yl]-4-hydroxy-2-hydroxymethylpyrrolidine
cgcaggatgcgaagagttgga

SEQ ID NO: 677 - RNA, 21 nt, synthetic construct
  source 1..21: mol_type = other RNA
  modified_base 1: mod_base = OTHER; note = 2'-O-methylguanosine-3'- phosphorothioate
  modified_base 2: mod_base = OTHER; note = 2'-O-methylcytidine-3'- phosphorothioate
  modified_base 3: mod_base = OTHER; note = 2'-O-methyladenosine-3'-phosphate
  modified_base 4: mod_base = OTHER; note = 2'-O-methylguanosine-3'-phosphate
  modified_base 5: mod_base = OTHER; note = 2'-O-methylguanosine-3'-phosphate
  modified_base 6: mod_base = OTHER; note = 2'-O-hexadecyl-adenosine-3'-phosphate
  modified_base 7: mod_base = OTHER; note = 2'-fluorouridine-3'-phosphate
  modified_base 8: mod_base = OTHER; note = 2'-O-methylguanosine-3'-phosphate
  modified_base 9: mod_base = OTHER; note = 2'-fluorocytidine-3'-phosphate
  modified_base 10: mod_base = OTHER; note = 2'-fluoroguanosine-3'-phosphate
  modified_base 11: mod_base = OTHER; note = 2'-fluoroadenosine-3'-phosphate
  modified_base 12: mod_base = OTHER; note = 2'-O-methyladenosine-3'-phosphate
  modified_base 13: mod_base = OTHER; note = 2'-O-methylguanosine-3'-phosphate
  modified_base 14: mod_base = OTHER; note = 2'-O-methyladenosine-3'-phosphate
  modified_base 15: mod_base = OTHER; note = 2'-O-methylguanosine-3'-phosphate
  modified_base 16: mod_base = OTHER; note = 2'-O-methyluridine-3'-phosphate
  modified_base 17: mod_base = OTHER; note = 2'-O-methyluridine-3'-phosphate
  modified_base 18: mod_base = OTHER; note = 2'-O-methylguanosine-3'-phosphate
  modified_base 19: mod_base = OTHER; note = 2'-O-methylguanosine-3'-phosphate
  modified_base 20: mod_base = OTHER; note = 2'-O-methylguanosine-3'-phosphate
  modified_base 21: mod_base = OTHER; note = 2'-O-methyladenosine-3'-phosphate N-[tris(GalNAc-alkyl)-amidodecanoyl)]-4-hydroxyprolinol Hyp-(GalNAc-alkyl)3 (2S,4R)-1-[29-[[2-(acetylamino)-2-deoxy-beta-D-galactopyran osyl]oxy]-14,14-bis[[3-[[3-[[5-[[2-(acetylamino)-2-deoxy-be ta-D-galactopyranosyl]oxy]-1-oxopentyl]amino]propyl]amino]- 3-oxopropoxy]methyl]-1,12,19,25-tetraoxo-16-oxa-13,20,24-tr iazanonacos-1-yl]-4-hydroxy-2-hydroxymethylpyrrolidine
gcaggatgcgaagagttggga

SEQ ID NO: 678 - RNA, 21 nt, synthetic construct
  source 1..21: mol_type = other RNA
  modified_base 1: mod_base = OTHER; note = 2'-O-methylguanosine-3'- phosphorothioate
  modified_base 2: mod_base = OTHER; note = 2'-O-methylcytidine-3'- phosphorothioate
  modified_base 3: mod_base = OTHER; note = 2'-O-methyladenosine-3'-phosphate
  modified_base 4: mod_base = OTHER; note = 2'-O-methylguanosine-3'-phosphate
  modified_base 5: mod_base = OTHER; note = 2'-O-methylguanosine-3'-phosphate
  modified_base 6: mod_base = OTHER; note = 2'-O-hexadecyl-adenosine-3'-phosphate
  modified_base 7: mod_base = OTHER; note = 2'-O-methyluridine-3'-phosphate
  modified_base 8: mod_base = OTHER; note = 2'-O-methylguanosine-3'-phosphate
  modified_base 9: mod_base = OTHER; note = 2'-fluorocytidine-3'-phosphate
  modified_base 10: mod_base = OTHER; note = 2'-fluoroguanosine-3'-phosphate
  modified_base 11: mod_base = OTHER; note = 2'-fluoroadenosine-3'-phosphate
  modified_base 12: mod_base = OTHER; note = 2'-O-methyladenosine-3'-phosphate
  modified_base 13: mod_base = OTHER; note = 2'-O-methylguanosine-3'-phosphate
  modified_base 14: mod_base = OTHER; note = 2'-O-methyladenosine-3'-phosphate
  modified_base 15: mod_base = OTHER; note = 2'-O-methylguanosine-3'-phosphate
  modified_base 16: mod_base = OTHER; note = 2'-O-methyluridine-3'-phosphate
  modified_base 17: mod_base = OTHER; note = 2'-O-methyluridine-3'-phosphate
  modified_base 18: mod_base = OTHER; note = 2'-O-methylguanosine-3'-phosphate
  modified_base 19: mod_base = OTHER; note = 2'-O-methylguanosine-3'-phosphate
  modified_base 20: mod_base = OTHER; note = 2'-O-methylguanosine-3'-phosphate
  modified_base 21: mod_base = OTHER; note = 2'-O-methyladenosine-3'-phosphate N-[tris(GalNAc-alkyl)-amidodecanoyl)]-4-hydroxyprolinol Hyp-(GalNAc-alkyl)3 (2S,4R)-1-[29-[[2-(acetylamino)-2-deoxy-beta-D-galactopyran osyl]oxy]-14,14-bis[[3-[[3-[[5-[[2-(acetylamino)-2-deoxy-be ta-D-galactopyranosyl]oxy]-1-oxopentyl]amino]propyl]amino]- 3-oxopropoxy]methyl]-1,12,19,25-tetraoxo-16-oxa-13,20,24-tr iazanonacos-1-yl]-4-hydroxy-2-hydroxymethylpyrrolidine
gcaggatgcgaagagttggga

SEQ ID NO: 679 - RNA, 21 nt, synthetic construct
  source 1..21: mol_type = other RNA
  modified_base 1: mod_base = OTHER; note = 2'-O-methyladenosine-3'- phosphorothioate
  modified_base 2: mod_base = OTHER; note = 2'-O-methyluridine-3'-phosphorothioate
  modified_base 3: mod_base = OTHER; note = 2'-O-methyluridine-3'-phosphate
  modified_base 4: mod_base = OTHER; note = 2'-O-methyluridine-3'-phosphate
  modified_base 5: mod_base = OTHER; note = 2'-O-methylguanosine-3'-phosphate
  modified_base 6: mod_base = OTHER; note = 2'-O-hexadecyl-cytidine-3'-phosphate
  modified_base 7: mod_base = OTHER; note = 2'-fluoroguanosine-3'-phosphate
  modified_base 8: mod_base = OTHER; note = 2'-O-methyladenosine-3'-phosphate
  modified_base 9: mod_base = OTHER; note = 2'-fluoroguanosine-3'-phosphate
  modified_base 10: mod_base = OTHER; note = 2'-fluoroadenosine-3'-phosphate
  modified_base 11: mod_base = OTHER; note = 2'-fluoroadenosine-3'-phosphate
  modified_base 12: mod_base = OTHER; note = 2'-O-methyladenosine-3'-phosphate
  modified_base 13: mod_base = OTHER; note = 2'-O-methylcytidine-3'-phosphate
  modified_base 14: mod_base = OTHER; note = 2'-O-methylcytidine-3'-phosphate
  modified_base 15: mod_base = OTHER; note = 2'-O-methyladenosine-3'-phosphate
  modified_base 16: mod_base = OTHER; note = 2'-O-methylguanosine-3'-phosphate
  modified_base 17: mod_base = OTHER; note = 2'-O-methylguanosine-3'-phosphate
  modified_base 18: mod_base = OTHER; note = 2'-O-methylguanosine-3'-phosphate
  modified_base 19: mod_base = OTHER; note = 2'-O-methylcytidine-3'-phosphate
  modified_base 20: mod_base = OTHER; note = 2'-O-methylguanosine-3'-phosphate
  modified_base 21: mod_base = OTHER; note = 2'-O-methyladenosine-3'-phosphate N-[tris(GalNAc-alkyl)-amidodecanoyl)]-4-hydroxyprolinol Hyp-(GalNAc-alkyl)3 (2S,4R)-1-[29-[[2-(acetylamino)-2-deoxy-beta-D-galactopyran osyl]oxy]-14,14-bis[[3-[[3-[[5-[[2-(acetylamino)-2-deoxy-be ta-D-galactopyranosyl]oxy]-1-oxopentyl]amino]propyl]amino]- 3-oxopropoxy]methyl]-1,12,19,25-tetraoxo-16-oxa-13,20,24-tr iazanonacos-1-yl]-4-hydroxy-2-hydroxymethylpyrrolidine
atttgcgagaaaccagggcga

SEQ ID NO: 680 - RNA, 21 nt, synthetic construct
  source 1..21: mol_type = other RNA
  modified_base 1: mod_base = OTHER; note = 2'-O-methyladenosine-3'- phosphorothioate
  modified_base 2: mod_base = OTHER; note = 2'-O-methyluridine-3'-phosphorothioate
  modified_base 3: mod_base = OTHER; note = 2'-O-methyluridine-3'-phosphate
  modified_base 4: mod_base = OTHER; note = 2'-O-methyluridine-3'-phosphate
  modified_base 5: mod_base = OTHER; note = 2'-O-methylguanosine-3'-phosphate
  modified_base 6: mod_base = OTHER; note = 2'-O-hexadecyl-cytidine-3'-phosphate
  modified_base 7: mod_base = OTHER; note = 2'-O-methylguanosine-3'-phosphate
  modified_base 8: mod_base = OTHER; note = 2'-O-methyladenosine-3'-phosphate
  modified_base 9: mod_base = OTHER; note = 2'-fluoroguanosine-3'-phosphate
  modified_base 10: mod_base = OTHER; note = 2'-fluoroadenosine-3'-phosphate
  modified_base 11: mod_base = OTHER; note = 2'-fluoroadenosine-3'-phosphate
  modified_base 12: mod_base = OTHER; note = 2'-O-methyladenosine-3'-phosphate
  modified_base 13: mod_base = OTHER; note = 2'-O-methylcytidine-3'-phosphate
  modified_base 14: mod_base = OTHER; note = 2'-O-methylcytidine-3'-phosphate
  modified_base 15: mod_base = OTHER; note = 2'-O-methyladenosine-3'-phosphate
  modified_base 16: mod_base = OTHER; note = 2'-O-methylguanosine-3'-phosphate
  modified_base 17: mod_base = OTHER; note = 2'-O-methylguanosine-3'-phosphate
  modified_base 18: mod_base = OTHER; note = 2'-O-methylguanosine-3'-phosphate
  modified_base 19: mod_base = OTHER; note = 2'-O-methylcytidine-3'-phosphate
  modified_base 20: mod_base = OTHER; note = 2'-O-methylguanosine-3'-phosphate
  modified_base 21: mod_base = OTHER; note = 2'-O-methyladenosine-3'-phosphate N-[tris(GalNAc-alkyl)-amidodecanoyl)]-4-hydroxyprolinol Hyp-(GalNAc-alkyl)3 (2S,4R)-1-[29-[[2-(acetylamino)-2-deoxy-beta-D-galactopyran osyl]oxy]-14,14-bis[[3-[[3-[[5-[[2-(acetylamino)-2-deoxy-be ta-D-galactopyranosyl]oxy]-1-oxopentyl]amino]propyl]amino]- 3-oxopropoxy]methyl]-1,12,19,25-tetraoxo-16-oxa-13,20,24-tr iazanonacos-1-yl]-4-hydroxy-2-hydroxymethylpyrrolidine
atttgcgagaaaccagggcga

SEQ ID NO: 681 - RNA, 21 nt, synthetic construct
  source 1..21: mol_type = other RNA
  modified_base 1: mod_base = OTHER; note = 2'-O-methyluridine-3'-phosphorothioate
  modified_base 2: mod_base = OTHER; note = 2'-O-methyluridine-3'-phosphorothioate
  modified_base 3: mod_base = OTHER; note = 2'-O-methyluridine-3'-phosphate
  modified_base 4: mod_base = OTHER; note = 2'-O-methylguanosine-3'-phosphate
  modified_base 5: mod_base = OTHER; note = 2'-O-methylcytidine-3'-phosphate
  modified_base 6: mod_base = OTHER; note = 2'-O-hexadecyl-guanosine-3'-phosphate
  modified_base 7: mod_base = OTHER; note = 2'-fluoroadenosine-3'-phosphate
  modified_base 8: mod_base = OTHER; note = 2'-O-methylguanosine-3'-phosphate
  modified_base 9: mod_base = OTHER; note = 2'-fluoroadenosine-3'-phosphate
  modified_base 10: mod_base = OTHER; note = 2'-fluoroadenosine-3'-phosphate
  modified_base 11: mod_base = OTHER; note = 2'-fluoroadenosine-3'-phosphate
  modified_base 12: mod_base = OTHER; note = 2'-O-methylcytidine-3'-phosphate
  modified_base 13: mod_base = OTHER; note = 2'-O-methylcytidine-3'-phosphate
  modified_base 14: mod_base = OTHER; note = 2'-O-methyladenosine-3'-phosphate
  modified_base 15: mod_base = OTHER; note = 2'-O-methylguanosine-3'-phosphate
  modified_base 16: mod_base = OTHER; note = 2'-O-methylguanosine-3'-phosphate
  modified_base 17: mod_base = OTHER; note = 2'-O-methylguanosine-3'-phosphate
  modified_base 18: mod_base = OTHER; note = 2'-O-methylcytidine-3'-phosphate
  modified_base 19: mod_base = OTHER; note = 2'-O-methylguanosine-3'-phosphate
  modified_base 20: mod_base = OTHER; note = 2'-O-methylguanosine-3'-phosphate
  modified_base 21: mod_base = OTHER; note = 2'-O-methyladenosine-3'-phosphate N-[tris(GalNAc-alkyl)-amidodecanoyl)]-4-hydroxyprolinol Hyp-(GalNAc-alkyl)3 (2S,4R)-1-[29-[[2-(acetylamino)-2-deoxy-beta-D-galactopyran osyl]oxy]-14,14-bis[[3-[[3-[[5-[[2-(acetylamino)-2-deoxy-be ta-D-galactopyranosyl]oxy]-1-oxopentyl]amino]propyl]amino]- 3-oxopropoxy]methyl]-1,12,19,25-tetraoxo-16-oxa-13,20,24-tr iazanonacos-1-yl]-4-hydroxy-2-hydroxymethylpyrrolidine
tttgcgagaaaccagggcgga

SEQ ID NO: 682 - RNA, 21 nt, synthetic construct
  source 1..21: mol_type = other RNA
  modified_base 1: mod_base = OTHER; note = 2'-O-methyluridine-3'-phosphorothioate
  modified_base 2: mod_base = OTHER; note = 2'-O-methyluridine-3'-phosphorothioate
  modified_base 3: mod_base = OTHER; note = 2'-O-methyluridine-3'-phosphate
  modified_base 4: mod_base = OTHER; note = 2'-O-methylguanosine-3'-phosphate
  modified_base 5: mod_base = OTHER; note = 2'-O-methylcytidine-3'-phosphate
  modified_base 6: mod_base = OTHER; note = 2'-O-hexadecyl-guanosine-3'-phosphate
  modified_base 7: mod_base = OTHER; note = 2'-O-methyladenosine-3'-phosphate
  modified_base 8: mod_base = OTHER; note = 2'-O-methylguanosine-3'-phosphate
  modified_base 9: mod_base = OTHER; note = 2'-fluoroadenosine-3'-phosphate
  modified_base 10: mod_base = OTHER; note = 2'-fluoroadenosine-3'-phosphate
  modified_base 11: mod_base = OTHER; note = 2'-fluoroadenosine-3'-phosphate
  modified_base 12: mod_base = OTHER; note = 2'-O-methylcytidine-3'-phosphate
  modified_base 13: mod_base = OTHER; note = 2'-O-methylcytidine-3'-phosphate
  modified_base 14: mod_base = OTHER; note = 2'-O-methyladenosine-3'-phosphate
  modified_base 15: mod_base = OTHER; note = 2'-O-methylguanosine-3'-phosphate
  modified_base 16: mod_base = OTHER; note = 2'-O-methylguanosine-3'-phosphate
  modified_base 17: mod_base = OTHER; note = 2'-O-methylguanosine-3'-phosphate
  modified_base 18: mod_base = OTHER; note = 2'-O-methylcytidine-3'-phosphate
  modified_base 19: mod_base = OTHER; note = 2'-O-methylguanosine-3'-phosphate
  modified_base 20: mod_base = OTHER; note = 2'-O-methylguanosine-3'-phosphate
  modified_base 21: mod_base = OTHER; note = 2'-O-methyladenosine-3'-phosphate N-[tris(GalNAc-alkyl)-amidodecanoyl)]-4-hydroxyprolinol Hyp-(GalNAc-alkyl)3 (2S,4R)-1-[29-[[2-(acetylamino)-2-deoxy-beta-D-galactopyran osyl]oxy]-14,14-bis[[3-[[3-[[5-[[2-(acetylamino)-2-deoxy-be ta-D-galactopyranosyl]oxy]-1-oxopentyl]amino]propyl]amino]- 3-oxopropoxy]methyl]-1,12,19,25-tetraoxo-16-oxa-13,20,24-tr iazanonacos-1-yl]-4-hydroxy-2-hydroxymethylpyrrolidine
tttgcgagaaaccagggcgga

SEQ ID NO: 683 - RNA, 21 nt, synthetic construct
  source 1..21: mol_type = other RNA
  modified_base 1: mod_base = OTHER; note = 2'-O-methyluridine-3'-phosphorothioate
  modified_base 2: mod_base = OTHER; note = 2'-O-methyluridine-3'-phosphorothioate
  modified_base 3: mod_base = OTHER; note = 2'-O-methylguanosine-3'-phosphate
  modified_base 4: mod_base = OTHER; note = 2'-O-methylcytidine-3'-phosphate
  modified_base 5: mod_base = OTHER; note = 2'-O-methylguanosine-3'-phosphate
  modified_base 6: mod_base = OTHER; note = 2'-O-hexadecyl-adenosine-3'-phosphate
  modified_base 7: mod_base = OTHER; note = 2'-fluoroguanosine-3'-phosphate
  modified_base 8: mod_base = OTHER; note = 2'-O-methyladenosine-3'-phosphate
  modified_base 9: mod_base = OTHER; note = 2'-fluoroadenosine-3'-phosphate
  modified_base 10: mod_base = OTHER; note = 2'-fluoroadenosine-3'-phosphate
  modified_base 11: mod_base = OTHER; note = 2'-fluorocytidine-3'-phosphate
  modified_base 12: mod_base = OTHER; note = 2'-O-methylcytidine-3'-phosphate
  modified_base 13: mod_base = OTHER; note = 2'-O-methyladenosine-3'-phosphate
  modified_base 14: mod_base = OTHER; note = 2'-O-methylguanosine-3'-phosphate
  modified_base 15: mod_base = OTHER; note = 2'-O-methylguanosine-3'-phosphate
  modified_base 16: mod_base = OTHER; note = 2'-O-methylguanosine-3'-phosphate
  modified_base 17: mod_base = OTHER; note = 2'-O-methylcytidine-3'-phosphate
  modified_base 18: mod_base = OTHER; note = 2'-O-methylguanosine-3'-phosphate
  modified_base 19: mod_base = OTHER; note = 2'-O-methylguanosine-3'-phosphate
  modified_base 20: mod_base = OTHER; note = 2'-O-methylguanosine-3'-phosphate
  modified_base 21: mod_base = OTHER; note = 2'-O-methyladenosine-3'-phosphate N-[tris(GalNAc-alkyl)-amidodecanoyl)]-4-hydroxyprolinol Hyp-(GalNAc-alkyl)3 (2S,4R)-1-[29-[[2-(acetylamino)-2-deoxy-beta-D-galactopyran osyl]oxy]-14,14-bis[[3-[[3-[[5-[[2-(acetylamino)-2-deoxy-be ta-D-galactopyranosyl]oxy]-1-oxopentyl]amino]propyl]amino]- 3-oxopropoxy]methyl]-1,12,19,25-tetraoxo-16-oxa-13,20,24-tr iazanonacos-1-yl]-4-hydroxy-2-hydroxymethylpyrrolidine
ttgcgagaaaccagggcggga

SEQ ID NO: 684 - RNA, 21 nt, synthetic construct
  source 1..21: mol_type = other RNA
  modified_base 1: mod_base = OTHER; note = 2'-O-methyluridine-3'-phosphorothioate
  modified_base 2: mod_base = OTHER; note = 2'-O-methyluridine-3'-phosphorothioate
  modified_base 3: mod_base = OTHER; note = 2'-O-methylguanosine-3'-phosphate
  modified_base 4: mod_base = OTHER; note = 2'-O-methylcytidine-3'-phosphate
  modified_base 5: mod_base = OTHER; note = 2'-O-methylguanosine-3'-phosphate
  modified_base 6: mod_base = OTHER; note = 2'-O-hexadecyl-adenosine-3'-phosphate
  modified_base 7: mod_base = OTHER; note = 2'-O-methylguanosine-3'-phosphate
  modified_base 8: mod_base = OTHER; note = 2'-O-methyladenosine-3'-phosphate
  modified_base 9: mod_base = OTHER; note = 2'-fluoroadenosine-3'-phosphate
  modified_base 10: mod_base = OTHER; note = 2'-fluoroadenosine-3'-phosphate
  modified_base 11: mod_base = OTHER; note = 2'-fluorocytidine-3'-phosphate
  modified_base 12: mod_base = OTHER; note = 2'-O-methylcytidine-3'-phosphate
  modified_base 13: mod_base = OTHER; note = 2'-O-methyladenosine-3'-phosphate
  modified_base 14: mod_base = OTHER; note = 2'-O-methylguanosine-3'-phosphate
  modified_base 15: mod_base = OTHER; note = 2'-O-methylguanosine-3'-phosphate
  modified_base 16: mod_base = OTHER; note = 2'-O-methylguanosine-3'-phosphate
  modified_base 17: mod_base = OTHER; note = 2'-O-methylcytidine-3'-phosphate
  modified_base 18: mod_base = OTHER; note = 2'-O-methylguanosine-3'-phosphate
  modified_base 19: mod_base = OTHER; note = 2'-O-methylguanosine-3'-phosphate
  modified_base 20: mod_base = OTHER; note = 2'-O-methylguanosine-3'-phosphate
  modified_base 21: mod_base = OTHER; note = 2'-O-methyladenosine-3'-phosphate N-[tris(GalNAc-alkyl)-amidodecanoyl)]-4-hydroxyprolinol Hyp-(GalNAc-alkyl)3 (2S,4R)-1-[29-[[2-(acetylamino)-2-deoxy-beta-D-galactopyran osyl]oxy]-14,14-bis[[3-[[3-[[5-[[2-(acetylamino)-2-deoxy-be ta-D-galactopyranosyl]oxy]-1-oxopentyl]amino]propyl]amino]- 3-oxopropoxy]methyl]-1,12,19,25-tetraoxo-16-oxa-13,20,24-tr iazanonacos-1-yl]-4-hydroxy-2-hydroxymethylpyrrolidine
ttgcgagaaaccagggcggga

SEQ ID NO: 685 - RNA, 21 nt, synthetic construct
  source 1..21: mol_type = other RNA
  modified_base 1: mod_base = OTHER; note = 2'-O-methyluridine-3'-phosphorothioate
  modified_base 2: mod_base = OTHER; note = 2'-O-methyladenosine-3'- phosphorothioate
  modified_base 3: mod_base = OTHER; note = 2'-O-methyladenosine-3'-phosphate
  modified_base 4: mod_base = OTHER; note = 2'-O-methylcytidine-3'-phosphate
  modified_base 5: mod_base = OTHER; note = 2'-O-methyluridine-3'-phosphate
  modified_base 6: mod_base = OTHER; note = 2'-O-hexadecyl-guanosine-3'-phosphate
  modified_base 7: mod_base = OTHER; note = 2'-fluorocytidine-3'-phosphate
  modified_base 8: mod_base = OTHER; note = 2'-O-methylguanosine-3'-phosphate
  modified_base 9: mod_base = OTHER; note = 2'-fluorouridine-3'-phosphate
  modified_base 10: mod_base = OTHER; note = 2'-fluorouridine-3'-phosphate
  modified_base 11: mod_base = OTHER; note = 2'-fluoroguanosine-3'-phosphate
  modified_base 12: mod_base = OTHER; note = 2'-O-methyluridine-3'-phosphate
  modified_base 13: mod_base = OTHER; note = 2'-O-methylguanosine-3'-phosphate
  modified_base 14: mod_base = OTHER; note = 2'-O-methyladenosine-3'-phosphate
  modified_base 15: mod_base = OTHER; note = 2'-O-methyladenosine-3'-phosphate
  modified_base 16: mod_base = OTHER; note = 2'-O-methylguanosine-3'-phosphate
  modified_base 17: mod_base = OTHER; note = 2'-O-methyladenosine-3'-phosphate
  modified_base 18: mod_base = OTHER; note = 2'-O-methylguanosine-3'-phosphate
  modified_base 19: mod_base = OTHER; note = 2'-O-methyladenosine-3'-phosphate
  modified_base 20: mod_base = OTHER; note = 2'-O-methyladenosine-3'-phosphate
  modified_base 21: mod_base = OTHER; note = 2'-O-methyladenosine-3'-phosphate N-[tris(GalNAc-alkyl)-amidodecanoyl)]-4-hydroxyprolinol Hyp-(GalNAc-alkyl)3 (2S,4R)-1-[29-[[2-(acetylamino)-2-deoxy-beta-D-galactopyran osyl]oxy]-14,14-bis[[3-[[3-[[5-[[2-(acetylamino)-2-deoxy-be ta-D-galactopyranosyl]oxy]-1-oxopentyl]amino]propyl]amino]- 3-oxopropoxy]methyl]-1,12,19,25-tetraoxo-16-oxa-13,20,24-tr iazanonacos-1-yl]-4-hydroxy-2-hydroxymethylpyrrolidine
taactgcgttgtgaagagaaa

SEQ ID NO: 686 - RNA, 21 nt, synthetic construct
  source 1..21: mol_type = other RNA
  modified_base 1: mod_base = OTHER; note = 2'-O-methyladenosine-3'- phosphorothioate
  modified_base 2: mod_base = OTHER; note = 2'-O-methylcytidine-3'- phosphorothioate
  modified_base 3: mod_base = OTHER; note = 2'-O-methyluridine-3'-phosphate
  modified_base 4: mod_base = OTHER; note = 2'-O-methylguanosine-3'-phosphate
  modified_base 5: mod_base = OTHER; note = 2'-O-methylcytidine-3'-phosphate
  modified_base 6: mod_base = OTHER; note = 2'-O-hexadecyl-guanosine-3'-phosphate
  modified_base 7: mod_base = OTHER; note = 2'-fluorouridine-3'-phosphate
  modified_base 8: mod_base = OTHER; note = 2'-O-methyluridine-3'-phosphate
  modified_base 9: mod_base = OTHER; note = 2'-fluoroguanosine-3'-phosphate
  modified_base 10: mod_base = OTHER; note = 2'-fluorouridine-3'-phosphate
  modified_base 11: mod_base = OTHER; note = 2'-fluoroguanosine-3'-phosphate
  modified_base 12: mod_base = OTHER; note = 2'-O-methyladenosine-3'-phosphate
  modified_base 13: mod_base = OTHER; note = 2'-O-methyladenosine-3'-phosphate
  modified_base 14: mod_base = OTHER; note = 2'-O-methylguanosine-3'-phosphate
  modified_base 15: mod_base = OTHER; note = 2'-O-methyladenosine-3'-phosphate
  modified_base 16: mod_base = OTHER; note = 2'-O-methylguanosine-3'-phosphate
  modified_base 17: mod_base = OTHER; note = 2'-O-methyladenosine-3'-phosphate
  modified_base 18: mod_base = OTHER; note = 2'-O-methyladenosine-3'-phosphate
  modified_base 19: mod_base = OTHER; note = 2'-O-methylcytidine-3'-phosphate
  modified_base 20: mod_base = OTHER; note = 2'-O-methyluridine-3'-phosphate
  modified_base 21: mod_base = OTHER; note = 2'-O-methyladenosine-3'-phosphate N-[tris(GalNAc-alkyl)-amidodecanoyl)]-4-hydroxyprolinol Hyp-(GalNAc-alkyl)3 (2S,4R)-1-[29-[[2-(acetylamino)-2-deoxy-beta-D-galactopyran osyl]oxy]-14,14-bis[[3-[[3-[[5-[[2-(acetylamino)-2-deoxy-be ta-D-galactopyranosyl]oxy]-1-oxopentyl]amino]propyl]amino]- 3-oxopropoxy]methyl]-1,12,19,25-tetraoxo-16-oxa-13,20,24-tr iazanonacos-1-yl]-4-hydroxy-2-hydroxymethylpyrrolidine
actgcgttgtgaagagaacta

SEQ ID NO: 687 - RNA, 21 nt, synthetic construct
  source 1..21: mol_type = other RNA
  modified_base 1: mod_base = OTHER; note = 2'-O-methyluridine-3'-phosphorothioate
  modified_base 2: mod_base = OTHER; note = 2'-O-methylguanosine-3'- phosphorothioate
  modified_base 3: mod_base = OTHER; note = 2'-O-methylcytidine-3'-phosphate
  modified_base 4: mod_base = OTHER; note = 2'-O-methylguanosine-3'-phosphate
  modified_base 5: mod_base = OTHER; note = 2'-O-methyluridine-3'-phosphate
  modified_base 6: mod_base = OTHER; note = 2'-O-hexadecyl-uridine-3'-phosphate
  modified_base 7: mod_base = OTHER; note = 2'-fluoroguanosine-3'-phosphate
  modified_base 8: mod_base = OTHER; note = 2'-O-methyluridine-3'-phosphate
  modified_base 9: mod_base = OTHER; note = 2'-fluoroguanosine-3'-phosphate
  modified_base 10: mod_base = OTHER; note = 2'-fluoroadenosine-3'-phosphate
  modified_base 11: mod_base = OTHER; note = 2'-fluoroadenosine-3'-phosphate
  modified_base 12: mod_base = OTHER; note = 2'-O-methylguanosine-3'-phosphate
  modified_base 13: mod_base = OTHER; note = 2'-O-methyladenosine-3'-phosphate
  modified_base 14: mod_base = OTHER; note = 2'-O-methylguanosine-3'-phosphate
  modified_base 15: mod_base = OTHER; note = 2'-O-methyladenosine-3'-phosphate
  modified_base 16: mod_base = OTHER; note = 2'-O-methyladenosine-3'-phosphate
  modified_base 17: mod_base = OTHER; note = 2'-O-methylcytidine-3'-phosphate
  modified_base 18: mod_base = OTHER; note = 2'-O-methyluridine-3'-phosphate
  modified_base 19: mod_base = OTHER; note = 2'-O-methyluridine-3'-phosphate
  modified_base 20: mod_base = OTHER; note = 2'-O-methylguanosine-3'-phosphate
  modified_base 21: mod_base = OTHER; note = 2'-O-methyladenosine-3'-phosphate N-[tris(GalNAc-alkyl)-amidodecanoyl)]-4-hydroxyprolinol Hyp-(GalNAc-alkyl)3 (2S,4R)-1-[29-[[2-(acetylamino)-2-deoxy-beta-D-galactopyran osyl]oxy]-14,14-bis[[3-[[3-[[5-[[2-(acetylamino)-2-deoxy-be ta-D-galactopyranosyl]oxy]-1-oxopentyl]amino]propyl]amino]- 3-oxopropoxy]methyl]-1,12,19,25-tetraoxo-16-oxa-13,20,24-tr iazanonacos-1-yl]-4-hydroxy-2-hydroxymethylpyrrolidine
tgcgttgtgaagagaacttga

SEQ ID NO: 688 - RNA, 21 nt, synthetic construct
  source 1..21: mol_type = other RNA
  modified_base 1: mod_base = OTHER; note = 2'-O-methyluridine-3'-phosphorothioate
  modified_base 2: mod_base = OTHER; note = 2'-O-methylguanosine-3'- phosphorothioate
  modified_base 3: mod_base = OTHER; note = 2'-O-methylcytidine-3'-phosphate
  modified_base 4: mod_base = OTHER; note = 2'-O-methylguanosine-3'-phosphate
  modified_base 5: mod_base = OTHER; note = 2'-O-methyluridine-3'-phosphate
  modified_base 6: mod_base = OTHER; note = 2'-O-hexadecyl-uridine-3'-phosphate
  modified_base 7: mod_base = OTHER; note = 2'-O-methylguanosine-3'-phosphate
  modified_base 8: mod_base = OTHER; note = 2'-O-methyluridine-3'-phosphate
  modified_base 9: mod_base = OTHER; note = 2'-fluoroguanosine-3'-phosphate
  modified_base 10: mod_base = OTHER; note = 2'-fluoroadenosine-3'-phosphate
  modified_base 11: mod_base = OTHER; note = 2'-fluoroadenosine-3'-phosphate
  modified_base 12: mod_base = OTHER; note = 2'-O-methylguanosine-3'-phosphate
  modified_base 13: mod_base = OTHER; note = 2'-O-methyladenosine-3'-phosphate
  modified_base 14: mod_base = OTHER; note = 2'-O-methylguanosine-3'-phosphate
  modified_base 15: mod_base = OTHER; note = 2'-O-methyladenosine-3'-phosphate
  modified_base 16: mod_base = OTHER; note = 2'-O-methyladenosine-3'-phosphate
  modified_base 17: mod_base = OTHER; note = 2'-O-methylcytidine-3'-phosphate
  modified_base 18: mod_base = OTHER; note = 2'-O-methyluridine-3'-phosphate
  modified_base 19: mod_base = OTHER; note = 2'-O-methyluridine-3'-phosphate
  modified_base 20: mod_base = OTHER; note = 2'-O-methylguanosine-3'-phosphate
  modified_base 21: mod_base = OTHER; note = 2'-O-methyladenosine-3'-phosphate N-[tris(GalNAc-alkyl)-amidodecanoyl)]-4-hydroxyprolinol Hyp-(GalNAc-alkyl)3 (2S,4R)-1-[29-[[2-(acetylamino)-2-deoxy-beta-D-galactopyran osyl]oxy]-14,14-bis[[3-[[3-[[5-[[2-(acetylamino)-2-deoxy-be ta-D-galactopyranosyl]oxy]-1-oxopentyl]amino]propyl]amino]- 3-oxopropoxy]methyl]-1,12,19,25-tetraoxo-16-oxa-13,20,24-tr iazanonacos-1-yl]-4-hydroxy-2-hydroxymethylpyrrolidine
tgcgttgtgaagagaacttga

SEQ ID NO: 689 - RNA, 21 nt, synthetic construct
  source 1..21: mol_type = other RNA
  modified_base 1: mod_base = OTHER; note = 2'-O-methylguanosine-3'- phosphorothioate
  modified_base 2: mod_base = OTHER; note = 2'-O-methylcytidine-3'- phosphorothioate
  modified_base 3: mod_base = OTHER; note = 2'-O-methylguanosine-3'-phosphate
  modified_base 4: mod_base = OTHER; note = 2'-O-methyluridine-3'-phosphate
  modified_base 5: mod_base = OTHER; note = 2'-O-methyluridine-3'-phosphate
  modified_base 6: mod_base = OTHER; note = 2'-O-hexadecyl-guanosine-3'-phosphate
  modified_base 7: mod_base = OTHER; note = 2'-fluorouridine-3'-phosphate
  modified_base 8: mod_base = OTHER; note = 2'-O-methylguanosine-3'-phosphate
  modified_base 9: mod_base = OTHER; note = 2'-fluoroadenosine-3'-phosphate
  modified_base 10: mod_base = OTHER; note = 2'-fluoroadenosine-3'-phosphate
  modified_base 11: mod_base = OTHER; note = 2'-fluoroguanosine-3'-phosphate
  modified_base 12: mod_base = OTHER; note = 2'-O-methyladenosine-3'-phosphate
  modified_base 13: mod_base = OTHER; note = 2'-O-methylguanosine-3'-phosphate
  modified_base 14: mod_base = OTHER; note = 2'-O-methyladenosine-3'-phosphate
  modified_base 15: mod_base = OTHER; note = 2'-O-methyladenosine-3'-phosphate
  modified_base 16: mod_base = OTHER; note = 2'-O-methylcytidine-3'-phosphate
  modified_base 17: mod_base = OTHER; note = 2'-O-methyluridine-3'-phosphate
  modified_base 18: mod_base = OTHER; note = 2'-O-methyluridine-3'-phosphate
  modified_base 19: mod_base = OTHER; note = 2'-O-methylguanosine-3'-phosphate
  modified_base 20: mod_base = OTHER; note = 2'-O-methylguanosine-3'-phosphate
  modified_base 21: mod_base = OTHER; note = 2'-O-methyladenosine-3'-phosphate N-[tris(GalNAc-alkyl)-amidodecanoyl)]-4-hydroxyprolinol Hyp-(GalNAc-alkyl)3 (2S,4R)-1-[29-[[2-(acetylamino)-2-deoxy-beta-D-galactopyran osyl]oxy]-14,14-bis[[3-[[3-[[5-[[2-(acetylamino)-2-deoxy-be ta-D-galactopyranosyl]oxy]-1-oxopentyl]amino]propyl]amino]- 3-oxopropoxy]methyl]-1,12,19,25-tetraoxo-16-oxa-13,20,24-tr iazanonacos-1-yl]-4-hydroxy-2-hydroxymethylpyrrolidine
gcgttgtgaagagaacttgga

SEQ ID NO: 690 - RNA, 21 nt, synthetic construct
  source 1..21: mol_type = other RNA
  modified_base 1: mod_base = OTHER; note = 2'-O-methylguanosine-3'- phosphorothioate
  modified_base 2: mod_base = OTHER; note = 2'-O-methylcytidine-3'- phosphorothioate
  modified_base 3: mod_base = OTHER; note = 2'-O-methylguanosine-3'-phosphate
  modified_base 4: mod_base = OTHER; note = 2'-O-methyluridine-3'-phosphate
  modified_base 5: mod_base = OTHER; note = 2'-O-methyluridine-3'-phosphate
  modified_base 6: mod_base = OTHER; note = 2'-O-hexadecyl-guanosine-3'-phosphate
  modified_base 7: mod_base = OTHER; note = 2'-O-methyluridine-3'-phosphate
  modified_base 8: mod_base = OTHER; note = 2'-O-methylguanosine-3'-phosphate
  modified_base 9: mod_base = OTHER; note = 2'-fluoroadenosine-3'-phosphate
  modified_base 10: mod_base = OTHER; note = 2'-fluoroadenosine-3'-phosphate
  modified_base 11: mod_base = OTHER; note = 2'-fluoroguanosine-3'-phosphate
  modified_base 12: mod_base = OTHER; note = 2'-O-methyladenosine-3'-phosphate
  modified_base 13: mod_base = OTHER; note = 2'-O-methylguanosine-3'-phosphate
  modified_base 14: mod_base = OTHER; note = 2'-O-methyladenosine-3'-phosphate
  modified_base 15: mod_base = OTHER; note = 2'-O-methyladenosine-3'-phosphate
  modified_base 16: mod_base = OTHER; note = 2'-O-methylcytidine-3'-phosphate
  modified_base 17: mod_base = OTHER; note = 2'-O-methyluridine-3'-phosphate
  modified_base 18: mod_base = OTHER; note = 2'-O-methyluridine-3'-phosphate
  modified_base 19: mod_base = OTHER; note = 2'-O-methylguanosine-3'-phosphate
  modified_base 20: mod_base = OTHER; note = 2'-O-methylguanosine-3'-phosphate
  modified_base 21: mod_base = OTHER; note = 2'-O-methyladenosine-3'-phosphate N-[tris(GalNAc-alkyl)-amidodecanoyl)]-4-hydroxyprolinol Hyp-(GalNAc-alkyl)3 (2S,4R)-1-[29-[[2-(acetylamino)-2-deoxy-beta-D-galactopyran osyl]oxy]-14,14-bis[[3-[[3-[[5-[[2-(acetylamino)-2-deoxy-be ta-D-galactopyranosyl]oxy]-1-oxopentyl]amino]propyl]amino]- 3-oxopropoxy]methyl]-1,12,19,25-tetraoxo-16-oxa-13,20,24-tr iazanonacos-1-yl]-4-hydroxy-2-hydroxymethylpyrrolidine
gcgttgtgaagagaacttgga

SEQ ID NO: 691 - RNA, 21 nt, synthetic construct
  source 1..21: mol_type = other RNA
  modified_base 1: mod_base = OTHER; note = 2'-O-methylguanosine-3'- phosphorothioate
  modified_base 2: mod_base = OTHER; note = 2'-O-methyluridine-3'-phosphorothioate
  modified_base 3: mod_base = OTHER; note = 2'-O-methyluridine-3'-phosphate
  modified_base 4: mod_base = OTHER; note = 2'-O-methylguanosine-3'-phosphate
  modified_base 5: mod_base = OTHER; note = 2'-O-methyluridine-3'-phosphate
  modified_base 6: mod_base = OTHER; note = 2'-O-hexadecyl-guanosine-3'-phosphate
  modified_base 7: mod_base = OTHER; note = 2'-fluoroadenosine-3'-phosphate
  modified_base 8: mod_base = OTHER; note = 2'-O-methyladenosine-3'-phosphate
  modified_base 9: mod_base = OTHER; note = 2'-fluoroguanosine-3'-phosphate
  modified_base 10: mod_base = OTHER; note = 2'-fluoroadenosine-3'-phosphate
  modified_base 11: mod_base = OTHER; note = 2'-fluoroguanosine-3'-phosphate
  modified_base 12: mod_base = OTHER; note = 2'-O-methyladenosine-3'-phosphate
  modified_base 13: mod_base = OTHER; note = 2'-O-methyladenosine-3'-phosphate
  modified_base 14: mod_base = OTHER; note = 2'-O-methylcytidine-3'-phosphate
  modified_base 15: mod_base = OTHER; note = 2'-O-methyluridine-3'-phosphate
  modified_base 16: mod_base = OTHER; note = 2'-O-methyluridine-3'-phosphate
  modified_base 17: mod_base = OTHER; note = 2'-O-methylguanosine-3'-phosphate
  modified_base 18: mod_base = OTHER; note = 2'-O-methylguanosine-3'-phosphate
  modified_base 19: mod_base = OTHER; note = 2'-O-methyladenosine-3'-phosphate
  modified_base 20: mod_base = OTHER; note = 2'-O-methylguanosine-3'-phosphate
  modified_base 21: mod_base = OTHER; note = 2'-O-methyladenosine-3'-phosphate N-[tris(GalNAc-alkyl)-amidodecanoyl)]-4-hydroxyprolinol Hyp-(GalNAc-alkyl)3 (2S,4R)-1-[29-[[2-(acetylamino)-2-deoxy-beta-D-galactopyran osyl]oxy]-14,14-bis[[3-[[3-[[5-[[2-(acetylamino)-2-deoxy-be ta-D-galactopyranosyl]oxy]-1-oxopentyl]amino]propyl]amino]- 3-oxopropoxy]methyl]-1,12,19,25-tetraoxo-16-oxa-13,20,24-tr iazanonacos-1-yl]-4-hydroxy-2-hydroxymethylpyrrolidine
gttgtgaagagaacttggaga

SEQ ID NO: 692 - RNA, 21 nt, synthetic construct
  source 1..21: mol_type = other RNA
  modified_base 1: mod_base = OTHER; note = 2'-O-methylguanosine-3'- phosphorothioate
  modified_base 2: mod_base = OTHER; note = 2'-O-methyluridine-3'-phosphorothioate
  modified_base 3: mod_base = OTHER; note = 2'-O-methyluridine-3'-phosphate
  modified_base 4: mod_base = OTHER; note = 2'-O-methylguanosine-3'-phosphate
  modified_base 5: mod_base = OTHER; note = 2'-O-methyluridine-3'-phosphate
  modified_base 6: mod_base = OTHER; note = 2'-O-hexadecyl-guanosine-3'-phosphate
  modified_base 7: mod_base = OTHER; note = 2'-O-methyladenosine-3'-phosphate
  modified_base 8: mod_base = OTHER; note = 2'-O-methyladenosine-3'-phosphate
  modified_base 9: mod_base = OTHER; note = 2'-fluoroguanosine-3'-phosphate
  modified_base 10: mod_base = OTHER; note = 2'-fluoroadenosine-3'-phosphate
  modified_base 11: mod_base = OTHER; note = 2'-fluoroguanosine-3'-phosphate
  modified_base 12: mod_base = OTHER; note = 2'-O-methyladenosine-3'-phosphate
  modified_base 13: mod_base = OTHER; note = 2'-O-methyladenosine-3'-phosphate
  modified_base 14: mod_base = OTHER; note = 2'-O-methylcytidine-3'-phosphate
  modified_base 15: mod_base = OTHER; note = 2'-O-methyluridine-3'-phosphate
  modified_base 16: mod_base = OTHER; note = 2'-O-methyluridine-3'-phosphate
  modified_base 17: mod_base = OTHER; note = 2'-O-methylguanosine-3'-phosphate
  modified_base 18: mod_base = OTHER; note = 2'-O-methylguanosine-3'-phosphate
  modified_base 19: mod_base = OTHER; note = 2'-O-methyladenosine-3'-phosphate
  modified_base 20: mod_base = OTHER; note = 2'-O-methylguanosine-3'-phosphate
  modified_base 21: mod_base = OTHER; note = 2'-O-methyladenosine-3'-phosphate N-[tris(GalNAc-alkyl)-amidodecanoyl)]-4-hydroxyprolinol Hyp-(GalNAc-alkyl)3 (2S,4R)-1-[29-[[2-(acetylamino)-2-deoxy-beta-D-galactopyran osyl]oxy]-14,14-bis[[3-[[3-[[5-[[2-(acetylamino)-2-deoxy-be ta-D-galactopyranosyl]oxy]-1-oxopentyl]amino]propyl]amino]- 3-oxopropoxy]methyl]-1,12,19,25-tetraoxo-16-oxa-13,20,24-tr iazanonacos-1-yl]-4-hydroxy-2-hydroxymethylpyrrolidine
gttgtgaagagaacttggaga

SEQ ID NO: 693 - RNA, 21 nt, synthetic construct
  source 1..21: mol_type = other RNA
  modified_base 1: mod_base = OTHER; note = 2'-O-methylguanosine-3'- phosphorothioate
  modified_base 2: mod_base = OTHER; note = 2'-O-methyluridine-3'-phosphorothioate
  modified_base 3: mod_base = OTHER; note = 2'-O-methylguanosine-3'-phosphate
  modified_base 4: mod_base = OTHER; note = 2'-O-methyladenosine-3'-phosphate
  modified_base 5: mod_base = OTHER; note = 2'-O-methyladenosine-3'-phosphate
  modified_base 6: mod_base = OTHER; note = 2'-O-hexadecyl-guanosine-3'-phosphate
  modified_base 7: mod_base = OTHER; note = 2'-fluoroadenosine-3'-phosphate
  modified_base 8: mod_base = OTHER; note = 2'-O-methylguanosine-3'-phosphate
  modified_base 9: mod_base = OTHER; note = 2'-fluoroadenosine-3'-phosphate
  modified_base 10: mod_base = OTHER; note = 2'-fluoroadenosine-3'-phosphate
  modified_base 11: mod_base = OTHER; note = 2'-fluorocytidine-3'-phosphate
  modified_base 12: mod_base = OTHER; note = 2'-O-methyluridine-3'-phosphate
  modified_base 13: mod_base = OTHER; note = 2'-O-methyluridine-3'-phosphate
  modified_base 14: mod_base = OTHER; note = 2'-O-methylguanosine-3'-phosphate
  modified_base 15: mod_base = OTHER; note = 2'-O-methylguanosine-3'-phosphate
  modified_base 16: mod_base = OTHER; note = 2'-O-methyladenosine-3'-phosphate
  modified_base 17: mod_base = OTHER; note = 2'-O-methylguanosine-3'-phosphate
  modified_base 18: mod_base = OTHER; note = 2'-O-methylguanosine-3'-phosphate
  modified_base 19: mod_base = OTHER; note = 2'-O-methyladenosine-3'-phosphate
  modified_base 20: mod_base = OTHER; note = 2'-O-methylguanosine-3'-phosphate
  modified_base 21: mod_base = OTHER; note = 2'-O-methyladenosine-3'-phosphate N-[tris(GalNAc-alkyl)-amidodecanoyl)]-4-hydroxyprolinol Hyp-(GalNAc-alkyl)3 (2S,4R)-1-[29-[[2-(acetylamino)-2-deoxy-beta-D-galactopyran osyl]oxy]-14,14-bis[[3-[[3-[[5-[[2-(acetylamino)-2-deoxy-be ta-D-galactopyranosyl]oxy]-1-oxopentyl]amino]propyl]amino]- 3-oxopropoxy]methyl]-1,12,19,25-tetraoxo-16-oxa-13,20,24-tr iazanonacos-1-yl]-4-hydroxy-2-hydroxymethylpyrrolidine
gtgaagagaacttggaggaga

SEQ ID NO: 694 - RNA, 21 nt, synthetic construct
  source 1..21: mol_type = other RNA
  modified_base 1: mod_base = OTHER; note = 2'-O-methylguanosine-3'- phosphorothioate
  modified_base 2: mod_base = OTHER; note = 2'-O-methyluridine-3'-phosphorothioate
  modified_base 3: mod_base = OTHER; note = 2'-O-methylguanosine-3'-phosphate
  modified_base 4: mod_base = OTHER; note = 2'-O-methyladenosine-3'-phosphate
  modified_base 5: mod_base = OTHER; note = 2'-O-methyladenosine-3'-phosphate
  modified_base 6: mod_base = OTHER; note = 2'-O-hexadecyl-guanosine-3'-phosphate
  modified_base 7: mod_base = OTHER; note = 2'-O-methyladenosine-3'-phosphate
  modified_base 8: mod_base = OTHER; note = 2'-O-methylguanosine-3'-phosphate
  modified_base 9: mod_base = OTHER; note = 2'-fluoroadenosine-3'-phosphate
  modified_base 10: mod_base = OTHER; note = 2'-fluoroadenosine-3'-phosphate
  modified_base 11: mod_base = OTHER; note = 2'-fluorocytidine-3'-phosphate
  modified_base 12: mod_base = OTHER; note = 2'-O-methyluridine-3'-phosphate
  modified_base 13: mod_base = OTHER; note = 2'-O-methyluridine-3'-phosphate
  modified_base 14: mod_base = OTHER; note = 2'-O-methylguanosine-3'-phosphate
  modified_base 15: mod_base = OTHER; note = 2'-O-methylguanosine-3'-phosphate
  modified_base 16: mod_base = OTHER; note = 2'-O-methyladenosine-3'-phosphate
  modified_base 17: mod_base = OTHER; note = 2'-O-methylguanosine-3'-phosphate
  modified_base 18: mod_base = OTHER; note = 2'-O-methylguanosine-3'-phosphate
  modified_base 19: mod_base = OTHER; note = 2'-O-methyladenosine-3'-phosphate
  modified_base 20: mod_base = OTHER; note = 2'-O-methylguanosine-3'-phosphate
  modified_base 21: mod_base = OTHER; note = 2'-O-methyladenosine-3'-phosphate N-[tris(GalNAc-alkyl)-amidodecanoyl)]-4-hydroxyprolinol Hyp-(GalNAc-alkyl)3 (2S,4R)-1-[29-[[2-(acetylamino)-2-deoxy-beta-D-galactopyran osyl]oxy]-14,14-bis[[3-[[3-[[5-[[2-(acetylamino)-2-deoxy-be ta-D-galactopyranosyl]oxy]-1-oxopentyl]amino]propyl]amino]- 3-oxopropoxy]methyl]-1,12,19,25-tetraoxo-16-oxa-13,20,24-tr iazanonacos-1-yl]-4-hydroxy-2-hydroxymethylpyrrolidine
gtgaagagaacttggaggaga

SEQ ID NO: 695 - RNA, 21 nt, synthetic construct
  source 1..21: mol_type = other RNA
  modified_base 1: mod_base = OTHER; note = 2'-O-methyluridine-3'-phosphorothioate
  modified_base 2: mod_base = OTHER; note = 2'-O-methylguanosine-3'- phosphorothioate
  modified_base 3: mod_base = OTHER; note = 2'-O-methyladenosine-3'-phosphate
  modified_base 4: mod_base = OTHER; note = 2'-O-methyladenosine-3'-phosphate
  modified_base 5: mod_base = OTHER; note = 2'-O-methylguanosine-3'-phosphate
  modified_base 6: mod_base = OTHER; note = 2'-O-hexadecyl-adenosine-3'-phosphate
  modified_base 7: mod_base = OTHER; note = 2'-fluoroguanosine-3'-phosphate
  modified_base 8: mod_base = OTHER; note = 2'-O-methyladenosine-3'-phosphate
  modified_base 9: mod_base = OTHER; note = 2'-fluoroadenosine-3'-phosphate
  modified_base 10: mod_base = OTHER; note = 2'-fluorocytidine-3'-phosphate
  modified_base 11: mod_base = OTHER; note = 2'-fluorouridine-3'-phosphate
  modified_base 12: mod_base = OTHER; note = 2'-O-methyluridine-3'-phosphate
  modified_base 13: mod_base = OTHER; note = 2'-O-methylguanosine-3'-phosphate
  modified_base 14: mod_base = OTHER; note = 2'-O-methylguanosine-3'-phosphate
  modified_base 15: mod_base = OTHER; note = 2'-O-methyladenosine-3'-phosphate
  modified_base 16: mod_base = OTHER; note = 2'-O-methylguanosine-3'-phosphate
  modified_base 17: mod_base = OTHER; note = 2'-O-methylguanosine-3'-phosphate
  modified_base 18: mod_base = OTHER; note = 2'-O-methyladenosine-3'-phosphate
  modified_base 19: mod_base = OTHER; note = 2'-O-methylguanosine-3'-phosphate
  modified_base 20: mod_base = OTHER; note = 2'-O-methylcytidine-3'-phosphate
  modified_base 21: mod_base = OTHER; note = 2'-O-methyladenosine-3'-phosphate N-[tris(GalNAc-alkyl)-amidodecanoyl)]-4-hydroxyprolinol Hyp-(GalNAc-alkyl)3 (2S,4R)-1-[29-[[2-(acetylamino)-2-deoxy-beta-D-galactopyran osyl]oxy]-14,14-bis[[3-[[3-[[5-[[2-(acetylamino)-2-deoxy-be ta-D-galactopyranosyl]oxy]-1-oxopentyl]amino]propyl]amino]- 3-oxopropoxy]methyl]-1,12,19,25-tetraoxo-16-oxa-13,20,24-tr iazanonacos-1-yl]-4-hydroxy-2-hydroxymethylpyrrolidine
tgaagagaacttggaggagca

SEQ ID NO: 696 - RNA, 21 nt, synthetic construct
  source 1..21: mol_type = other RNA
  modified_base 1: mod_base = OTHER; note = 2'-O-methyladenosine-3'- phosphorothioate
  modified_base 2: mod_base = OTHER; note = 2'-O-methylguanosine-3'- phosphorothioate
  modified_base 3: mod_base = OTHER; note = 2'-O-methyladenosine-3'-phosphate
  modified_base 4: mod_base = OTHER; note = 2'-O-methylguanosine-3'-phosphate
  modified_base 5: mod_base = OTHER; note = 2'-O-methyladenosine-3'-phosphate
  modified_base 6: mod_base = OTHER; note = 2'-O-hexadecyl-adenosine-3'-phosphate
  modified_base 7: mod_base = OTHER; note = 2'-fluorocytidine-3'-phosphate
  modified_base 8: mod_base = OTHER; note = 2'-O-methyluridine-3'-phosphate
  modified_base 9: mod_base = OTHER; note = 2'-fluorouridine-3'-phosphate
  modified_base 10: mod_base = OTHER; note = 2'-fluoroguanosine-3'-phosphate
  modified_base 11: mod_base = OTHER; note = 2'-fluoroguanosine-3'-phosphate
  modified_base 12: mod_base = OTHER; note = 2'-O-methyladenosine-3'-phosphate
  modified_base 13: mod_base = OTHER; note = 2'-O-methylguanosine-3'-phosphate
  modified_base 14: mod_base = OTHER; note = 2'-O-methylguanosine-3'-phosphate
  modified_base 15: mod_base = OTHER; note = 2'-O-methyladenosine-3'-phosphate
  modified_base 16: mod_base = OTHER; note = 2'-O-methylguanosine-3'-phosphate
  modified_base 17: mod_base = OTHER; note = 2'-O-methylcytidine-3'-phosphate
  modified_base 18: mod_base = OTHER; note = 2'-O-methylcytidine-3'-phosphate
  modified_base 19: mod_base = OTHER; note = 2'-O-methylguanosine-3'-phosphate
  modified_base 20: mod_base = OTHER; note = 2'-O-methyladenosine-3'-phosphate
  modified_base 21: mod_base = OTHER; note = 2'-O-methyladenosine-3'-phosphate N-[tris(GalNAc-alkyl)-amidodecanoyl)]-4-hydroxyprolinol Hyp-(GalNAc-alkyl)3 (2S,4R)-1-[29-[[2-(acetylamino)-2-deoxy-beta-D-galactopyran osyl]oxy]-14,14-bis[[3-[[3-[[5-[[2-(acetylamino)-2-deoxy-be ta-D-galactopyranosyl]oxy]-1-oxopentyl]amino]propyl]amino]- 3-oxopropoxy]methyl]-1,12,19,25-tetraoxo-16-oxa-13,20,24-tr iazanonacos-1-yl]-4-hydroxy-2-hydroxymethylpyrrolidine
agagaacttggaggagccgaa

SEQ ID NO: 697 - RNA, 21 nt, synthetic construct
  source 1..21: mol_type = other RNA
  modified_base 1: mod_base = OTHER; note = 2'-O-methylguanosine-3'- phosphorothioate
  modified_base 2: mod_base = OTHER; note = 2'-O-methyladenosine-3'- phosphorothioate
  modified_base 3: mod_base = OTHER; note = 2'-O-methylguanosine-3'-phosphate
  modified_base 4: mod_base = OTHER; note = 2'-O-methyladenosine-3'-phosphate
  modified_base 5: mod_base = OTHER; note = 2'-O-methyladenosine-3'-phosphate
  modified_base 6: mod_base = OTHER; note = 2'-O-hexadecyl-cytidine-3'-phosphate
  modified_base 7: mod_base = OTHER; note = 2'-fluorouridine-3'-phosphate
  modified_base 8: mod_base = OTHER; note = 2'-O-methyluridine-3'-phosphate
  modified_base 9: mod_base = OTHER; note = 2'-fluoroguanosine-3'-phosphate
  modified_base 10: mod_base = OTHER; note = 2'-fluoroguanosine-3'-phosphate
  modified_base 11: mod_base = OTHER; note = 2'-fluoroadenosine-3'-phosphate
  modified_base 12: mod_base = OTHER; note = 2'-O-methylguanosine-3'-phosphate
  modified_base 13: mod_base = OTHER; note = 2'-O-methylguanosine-3'-phosphate
  modified_base 14: mod_base = OTHER; note = 2'-O-methyladenosine-3'-phosphate
  modified_base 15: mod_base = OTHER; note = 2'-O-methylguanosine-3'-phosphate
  modified_base 16: mod_base = OTHER; note = 2'-O-methylcytidine-3'-phosphate
  modified_base 17: mod_base = OTHER; note = 2'-O-methylcytidine-3'-phosphate
  modified_base 18: mod_base = OTHER; note = 2'-O-methylguanosine-3'-phosphate
  modified_base 19: mod_base = OTHER; note = 2'-O-methyladenosine-3'-phosphate
  modified_base 20: mod_base = OTHER; note = 2'-O-methylguanosine-3'-phosphate
  modified_base 21: mod_base = OTHER; note = 2'-O-methyladenosine-3'-phosphate N-[tris(GalNAc-alkyl)-amidodecanoyl)]-4-hydroxyprolinol Hyp-(GalNAc-alkyl)3 (2S,4R)-1-[29-[[2-(acetylamino)-2-deoxy-beta-D-galactopyran osyl]oxy]-14,14-bis[[3-[[3-[[5-[[2-(acetylamino)-2-deoxy-be ta-D-galactopyranosyl]oxy]-1-oxopentyl]amino]propyl]amino]- 3-oxopropoxy]methyl]-1,12,19,25-tetraoxo-16-oxa-13,20,24-tr iazanonacos-1-yl]-4-hydroxy-2-hydroxymethylpyrrolidine
gagaacttggaggagccgaga

SEQ ID NO: 698 - RNA, 21 nt, synthetic construct
  source 1..21: mol_type = other RNA
  modified_base 1: mod_base = OTHER; note = 2'-O-methylguanosine-3'- phosphorothioate
  modified_base 2: mod_base = OTHER; note = 2'-O-methyladenosine-3'- phosphorothioate
  modified_base 3: mod_base = OTHER; note = 2'-O-methylguanosine-3'-phosphate
  modified_base 4: mod_base = OTHER; note = 2'-O-methyladenosine-3'-phosphate
  modified_base 5: mod_base = OTHER; note = 2'-O-methyladenosine-3'-phosphate
  modified_base 6: mod_base = OTHER; note = 2'-O-hexadecyl-cytidine-3'-phosphate
  modified_base 7: mod_base = OTHER; note = 2'-O-methyluridine-3'-phosphate
  modified_base 8: mod_base = OTHER; note = 2'-O-methyluridine-3'-phosphate
  modified_base 9: mod_base = OTHER; note = 2'-fluoroguanosine-3'-phosphate
  modified_base 10: mod_base = OTHER; note = 2'-fluoroguanosine-3'-phosphate
  modified_base 11: mod_base = OTHER; note = 2'-fluoroadenosine-3'-phosphate
  modified_base 12: mod_base = OTHER; note = 2'-O-methylguanosine-3'-phosphate
  modified_base 13: mod_base = OTHER; note = 2'-O-methylguanosine-3'-phosphate
  modified_base 14: mod_base = OTHER; note = 2'-O-methyladenosine-3'-phosphate
  modified_base 15: mod_base = OTHER; note = 2'-O-methylguanosine-3'-phosphate
  modified_base 16: mod_base = OTHER; note = 2'-O-methylcytidine-3'-phosphate
  modified_base 17: mod_base = OTHER; note = 2'-O-methylcytidine-3'-phosphate
  modified_base 18: mod_base = OTHER; note = 2'-O-methylguanosine-3'-phosphate
  modified_base 19: mod_base = OTHER; note = 2'-O-methyladenosine-3'-phosphate
  modified_base 20: mod_base = OTHER; note = 2'-O-methylguanosine-3'-phosphate
  modified_base 21: mod_base = OTHER; note = 2'-O-methyladenosine-3'-phosphate N-[tris(GalNAc-alkyl)-amidodecanoyl)]-4-hydroxyprolinol Hyp-(GalNAc-alkyl)3 (2S,4R)-1-[29-[[2-(acetylamino)-2-deoxy-beta-D-galactopyran osyl]oxy]-14,14-bis[[3-[[3-[[5-[[2-(acetylamino)-2-deoxy-be ta-D-galactopyranosyl]oxy]-1-oxopentyl]amino]propyl]amino]- 3-oxopropoxy]methyl]-1,12,19,25-tetraoxo-16-oxa-13,20,24-tr iazanonacos-1-yl]-4-hydroxy-2-hydroxymethylpyrrolidine
gagaacttggaggagccgaga

SEQ ID NO: 699 - RNA, 21 nt, synthetic construct
  source 1..21: mol_type = other RNA
  modified_base 1: mod_base = OTHER; note = 2'-O-methylcytidine-3'- phosphorothioate
  modified_base 2: mod_base = OTHER; note = 2'-O-methyluridine-3'-phosphorothioate
  modified_base 3: mod_base = OTHER; note = 2'-O-methyluridine-3'-phosphate
  modified_base 4: mod_base = OTHER; note = 2'-O-methylguanosine-3'-phosphate
  modified_base 5: mod_base = OTHER; note = 2'-O-methylguanosine-3'-phosphate
  modified_base 6: mod_base = OTHER; note = 2'-O-hexadecyl-adenosine-3'-phosphate
  modified_base 7: mod_base = OTHER; note = 2'-fluoroguanosine-3'-phosphate
  modified_base 8: mod_base = OTHER; note = 2'-O-methylguanosine-3'-phosphate
  modified_base 9: mod_base = OTHER; note = 2'-fluoroadenosine-3'-phosphate
  modified_base 10: mod_base = OTHER; note = 2'-fluoroguanosine-3'-phosphate
  modified_base 11: mod_base = OTHER; note = 2'-fluorocytidine-3'-phosphate
  modified_base 12: mod_base = OTHER; note = 2'-O-methylcytidine-3'-phosphate
  modified_base 13: mod_base = OTHER; note = 2'-O-methylguanosine-3'-phosphate
  modified_base 14: mod_base = OTHER; note = 2'-O-methyladenosine-3'-phosphate
  modified_base 15: mod_base = OTHER; note = 2'-O-methylguanosine-3'-phosphate
  modified_base 16: mod_base = OTHER; note = 2'-O-methyladenosine-3'-phosphate
  modified_base 17: mod_base = OTHER; note = 2'-O-methyluridine-3'-phosphate
  modified_base 18: mod_base = OTHER; note = 2'-O-methyluridine-3'-phosphate
  modified_base 19: mod_base = OTHER; note = 2'-O-methyluridine-3'-phosphate
  modified_base 20: mod_base = OTHER; note = 2'-O-methylguanosine-3'-phosphate
  modified_base 21: mod_base = OTHER; note = 2'-O-methyladenosine-3'-phosphate N-[tris(GalNAc-alkyl)-amidodecanoyl)]-4-hydroxyprolinol Hyp-(GalNAc-alkyl)3 (2S,4R)-1-[29-[[2-(acetylamino)-2-deoxy-beta-D-galactopyran osyl]oxy]-14,14-bis[[3-[[3-[[5-[[2-(acetylamino)-2-deoxy-be ta-D-galactopyranosyl]oxy]-1-oxopentyl]amino]propyl]amino]- 3-oxopropoxy]methyl]-1,12,19,25-tetraoxo-16-oxa-13,20,24-tr iazanonacos-1-yl]-4-hydroxy-2-hydroxymethylpyrrolidine
cttggaggagccgagatttga

SEQ ID NO: 700 - RNA, 21 nt, synthetic construct
  source 1..21: mol_type = other RNA
  modified_base 1: mod_base = OTHER; note = 2'-O-methylcytidine-3'- phosphorothioate
  modified_base 2: mod_base = OTHER; note = 2'-O-methyluridine-3'-phosphorothioate
  modified_base 3: mod_base = OTHER; note = 2'-O-methyluridine-3'-phosphate
  modified_base 4: mod_base = OTHER; note = 2'-O-methylguanosine-3'-phosphate
  modified_base 5: mod_base = OTHER; note = 2'-O-methylguanosine-3'-phosphate
  modified_base 6: mod_base = OTHER; note = 2'-O-hexadecyl-adenosine-3'-phosphate
  modified_base 7: mod_base = OTHER; note = 2'-O-methylguanosine-3'-phosphate
  modified_base 8: mod_base = OTHER; note = 2'-O-methylguanosine-3'-phosphate
  modified_base 9: mod_base = OTHER; note = 2'-fluoroadenosine-3'-phosphate
  modified_base 10: mod_base = OTHER; note = 2'-fluoroguanosine-3'-phosphate
  modified_base 11: mod_base = OTHER; note = 2'-fluorocytidine-3'-phosphate
  modified_base 12: mod_base = OTHER; note = 2'-O-methylcytidine-3'-phosphate
  modified_base 13: mod_base = OTHER; note = 2'-O-methylguanosine-3'-phosphate
  modified_base 14: mod_base = OTHER; note = 2'-O-methyladenosine-3'-phosphate
  modified_base 15: mod_base = OTHER; note = 2'-O-methylguanosine-3'-phosphate
  modified_base 16: mod_base = OTHER; note = 2'-O-methyladenosine-3'-phosphate
  modified_base 17: mod_base = OTHER; note = 2'-O-methyluridine-3'-phosphate
  modified_base 18: mod_base = OTHER; note = 2'-O-methyluridine-3'-phosphate
  modified_base 19: mod_base = OTHER; note = 2'-O-methyluridine-3'-phosphate
  modified_base 20: mod_base = OTHER; note = 2'-O-methylguanosine-3'-phosphate
  modified_base 21: mod_base = OTHER; note = 2'-O-methyladenosine-3'-phosphate N-[tris(GalNAc-alkyl)-amidodecanoyl)]-4-hydroxyprolinol Hyp-(GalNAc-alkyl)3 (2S,4R)-1-[29-[[2-(acetylamino)-2-deoxy-beta-D-galactopyran osyl]oxy]-14,14-bis[[3-[[3-[[5-[[2-(acetylamino)-2-deoxy-be ta-D-galactopyranosyl]oxy]-1-oxopentyl]amino]propyl]amino]- 3-oxopropoxy]methyl]-1,12,19,25-tetraoxo-16-oxa-13,20,24-tr iazanonacos-1-yl]-4-hydroxy-2-hydroxymethylpyrrolidine
cttggaggagccgagatttga

SEQ ID NO: 701 - RNA, 21 nt, synthetic construct
  source 1..21: mol_type = other RNA
  modified_base 1: mod_base = OTHER; note = 2'-O-methyluridine-3'-phosphorothioate
  modified_base 2: mod_base = OTHER; note = 2'-O-methyluridine-3'-phosphorothioate
  modified_base 3: mod_base = OTHER; note = 2'-O-methylguanosine-3'-phosphate
  modified_base 4: mod_base = OTHER; note = 2'-O-methylguanosine-3'-phosphate
  modified_base 5: mod_base = OTHER; note = 2'-O-methyladenosine-3'-phosphate
  modified_base 6: mod_base = OTHER; note = 2'-O-hexadecyl-guanosine-3'-phosphate
  modified_base 7: mod_base = OTHER; note = 2'-fluoroguanosine-3'-phosphate
  modified_base 8: mod_base = OTHER; note = 2'-O-methyladenosine-3'-phosphate
  modified_base 9: mod_base = OTHER; note = 2'-fluoroguanosine-3'-phosphate
  modified_base 10: mod_base = OTHER; note = 2'-fluorocytidine-3'-phosphate
  modified_base 11: mod_base = OTHER; note = 2'-fluorocytidine-3'-phosphate
  modified_base 12: mod_base = OTHER; note = 2'-O-methylguanosine-3'-phosphate
  modified_base 13: mod_base = OTHER; note = 2'-O-methyladenosine-3'-phosphate
  modified_base 14: mod_base = OTHER; note = 2'-O-methylguanosine-3'-phosphate
  modified_base 15: mod_base = OTHER; note = 2'-O-methyladenosine-3'-phosphate
  modified_base 16: mod_base = OTHER; note = 2'-O-methyluridine-3'-phosphate
  modified_base 17: mod_base = OTHER; note = 2'-O-methyluridine-3'-phosphate
  modified_base 18: mod_base = OTHER; note = 2'-O-methyluridine-3'-phosphate
  modified_base 19: mod_base = OTHER; note = 2'-O-methylguanosine-3'-phosphate
  modified_base 20: mod_base = OTHER; note = 2'-O-methylcytidine-3'-phosphate
  modified_base 21: mod_base = OTHER; note = 2'-O-methyladenosine-3'-phosphate N-[tris(GalNAc-alkyl)-amidodecanoyl)]-4-hydroxyprolinol Hyp-(GalNAc-alkyl)3 (2S,4R)-1-[29-[[2-(acetylamino)-2-deoxy-beta-D-galactopyran osyl]oxy]-14,14-bis[[3-[[3-[[5-[[2-(acetylamino)-2-deoxy-be ta-D-galactopyranosyl]oxy]-1-oxopentyl]amino]propyl]amino]- 3-oxopropoxy]methyl]-1,12,19,25-tetraoxo-16-oxa-13,20,24-tr iazanonacos-1-yl]-4-hydroxy-2-hydroxymethylpyrrolidine
ttggaggagccgagatttgca

SEQ ID NO: 702 - RNA, 21 nt, synthetic construct
  source 1..21: mol_type = other RNA
  modified_base 1: mod_base = OTHER; note = 2'-O-methyluridine-3'-phosphorothioate
  modified_base 2: mod_base = OTHER; note = 2'-O-methyluridine-3'-phosphorothioate
  modified_base 3: mod_base = OTHER; note = 2'-O-methylguanosine-3'-phosphate
  modified_base 4: mod_base = OTHER; note = 2'-O-methylguanosine-3'-phosphate
  modified_base 5: mod_base = OTHER; note = 2'-O-methyladenosine-3'-phosphate
  modified_base 6: mod_base = OTHER; note = 2'-O-hexadecyl-guanosine-3'-phosphate
  modified_base 7: mod_base = OTHER; note = 2'-O-methylguanosine-3'-phosphate
  modified_base 8: mod_base = OTHER; note = 2'-O-methyladenosine-3'-phosphate
  modified_base 9: mod_base = OTHER; note = 2'-fluoroguanosine-3'-phosphate
  modified_base 10: mod_base = OTHER; note = 2'-fluorocytidine-3'-phosphate
  modified_base 11: mod_base = OTHER; note = 2'-fluorocytidine-3'-phosphate
  modified_base 12: mod_base = OTHER; note = 2'-O-methylguanosine-3'-phosphate
  modified_base 13: mod_base = OTHER; note = 2'-O-methyladenosine-3'-phosphate
  modified_base 14: mod_base = OTHER; note = 2'-O-methylguanosine-3'-phosphate
  modified_base 15: mod_base = OTHER; note = 2'-O-methyladenosine-3'-phosphate
  modified_base 16: mod_base = OTHER; note = 2'-O-methyluridine-3'-phosphate
  modified_base 17: mod_base = OTHER; note = 2'-O-methyluridine-3'-phosphate
  modified_base 18: mod_base = OTHER; note = 2'-O-methyluridine-3'-phosphate
  modified_base 19: mod_base = OTHER; note = 2'-O-methylguanosine-3'-phosphate
  modified_base 20: mod_base = OTHER; note = 2'-O-methylcytidine-3'-phosphate
  modified_base 21: mod_base = OTHER; note = 2'-O-methyladenosine-3'-phosphate N-[tris(GalNAc-alkyl)-amidodecanoyl)]-4-hydroxyprolinol Hyp-(GalNAc-alkyl)3 (2S,4R)-1-[29-[[2-(acetylamino)-2-deoxy-beta-D-galactopyran osyl]oxy]-14,14-bis[[3-[[3-[[5-[[2-(acetylamino)-2-deoxy-be ta-D-galactopyranosyl]oxy]-1-oxopentyl]amino]propyl]amino]- 3-oxopropoxy]methyl]-1,12,19,25-tetraoxo-16-oxa-13,20,24-tr iazanonacos-1-yl]-4-hydroxy-2-hydroxymethylpyrrolidine
ttggaggagccgagatttgca

SEQ ID NO: 703 - RNA, 21 nt, synthetic construct
  source 1..21: mol_type = other RNA
  modified_base 1: mod_base = OTHER; note = 2'-O-methyluridine-3'-phosphorothioate
  modified_base 2: mod_base = OTHER; note = 2'-O-methylguanosine-3'- phosphorothioate
  modified_base 3: mod_base = OTHER; note = 2'-O-methylguanosine-3'-phosphate
  modified_base 4: mod_base = OTHER; note = 2'-O-methyladenosine-3'-phosphate
  modified_base 5: mod_base = OTHER; note = 2'-O-methylguanosine-3'-phosphate
  modified_base 6: mod_base = OTHER; note = 2'-O-hexadecyl-guanosine-3'-phosphate
  modified_base 7: mod_base = OTHER; note = 2'-fluoroadenosine-3'-phosphate
  modified_base 8: mod_base = OTHER; note = 2'-O-methylguanosine-3'-phosphate
  modified_base 9: mod_base = OTHER; note = 2'-fluorocytidine-3'-phosphate
  modified_base 10: mod_base = OTHER; note = 2'-fluorocytidine-3'-phosphate
  modified_base 11: mod_base = OTHER; note = 2'-fluoroguanosine-3'-phosphate
  modified_base 12: mod_base = OTHER; note = 2'-O-methyladenosine-3'-phosphate
  modified_base 13: mod_base = OTHER; note = 2'-O-methylguanosine-3'-phosphate
  modified_base 14: mod_base = OTHER; note = 2'-O-methyladenosine-3'-phosphate
  modified_base 15: mod_base = OTHER; note = 2'-O-methyluridine-3'-phosphate
  modified_base 16: mod_base = OTHER; note = 2'-O-methyluridine-3'-phosphate
  modified_base 17: mod_base = OTHER; note = 2'-O-methyluridine-3'-phosphate
  modified_base 18: mod_base = OTHER; note = 2'-O-methylguanosine-3'-phosphate
  modified_base 19: mod_base = OTHER; note = 2'-O-methylcytidine-3'-phosphate
  modified_base 20: mod_base = OTHER; note = 2'-O-methyluridine-3'-phosphate
  modified_base 21: mod_base = OTHER; note = 2'-O-methyladenosine-3'-phosphate N-[tris(GalNAc-alkyl)-amidodecanoyl)]-4-hydroxyprolinol Hyp-(GalNAc-alkyl)3 (2S,4R)-1-[29-[[2-(acetylamino)-2-deoxy-beta-D-galactopyran osyl]oxy]-14,14-bis[[3-[[3-[[5-[[2-(acetylamino)-2-deoxy-be ta-D-galactopyranosyl]oxy]-1-oxopentyl]amino]propyl]amino]- 3-oxopropoxy]methyl]-1,12,19,25-tetraoxo-16-oxa-13,20,24-tr iazanonacos-1-yl]-4-hydroxy-2-hydroxymethylpyrrolidine
tggaggagccgagatttgcta

SEQ ID NO: 704 - RNA, 21 nt, synthetic construct
  source 1..21: mol_type = other RNA
  modified_base 1: mod_base = OTHER; note = 2'-O-methyluridine-3'-phosphorothioate
  modified_base 2: mod_base = OTHER; note = 2'-O-methylguanosine-3'- phosphorothioate
  modified_base 3: mod_base = OTHER; note = 2'-O-methylguanosine-3'-phosphate
  modified_base 4: mod_base = OTHER; note = 2'-O-methyladenosine-3'-phosphate
  modified_base 5: mod_base = OTHER; note = 2'-O-methylguanosine-3'-phosphate
  modified_base 6: mod_base = OTHER; note = 2'-O-hexadecyl-guanosine-3'-phosphate
  modified_base 7: mod_base = OTHER; note = 2'-O-methyladenosine-3'-phosphate
  modified_base 8: mod_base = OTHER; note = 2'-O-methylguanosine-3'-phosphate
  modified_base 9: mod_base = OTHER; note = 2'-fluorocytidine-3'-phosphate
  modified_base 10: mod_base = OTHER; note = 2'-fluorocytidine-3'-phosphate
  modified_base 11: mod_base = OTHER; note = 2'-fluoroguanosine-3'-phosphate
  modified_base 12: mod_base = OTHER; note = 2'-O-methyladenosine-3'-phosphate
  modified_base 13: mod_base = OTHER; note = 2'-O-methylguanosine-3'-phosphate
  modified_base 14: mod_base = OTHER; note = 2'-O-methyladenosine-3'-phosphate
  modified_base 15: mod_base = OTHER; note = 2'-O-methyluridine-3'-phosphate
  modified_base 16: mod_base = OTHER; note = 2'-O-methyluridine-3'-phosphate
  modified_base 17: mod_base = OTHER; note = 2'-O-methyluridine-3'-phosphate
  modified_base 18: mod_base = OTHER; note = 2'-O-methylguanosine-3'-phosphate
  modified_base 19: mod_base = OTHER; note = 2'-O-methylcytidine-3'-phosphate
  modified_base 20: mod_base = OTHER; note = 2'-O-methyluridine-3'-phosphate
  modified_base 21: mod_base = OTHER; note = 2'-O-methyladenosine-3'-phosphate N-[tris(GalNAc-alkyl)-amidodecanoyl)]-4-hydroxyprolinol Hyp-(GalNAc-alkyl)3 (2S,4R)-1-[29-[[2-(acetylamino)-2-deoxy-beta-D-galactopyran osyl]oxy]-14,14-bis[[3-[[3-[[5-[[2-(acetylamino)-2-deoxy-be ta-D-galactopyranosyl]oxy]-1-oxopentyl]amino]propyl]amino]- 3-oxopropoxy]methyl]-1,12,19,25-tetraoxo-16-oxa-13,20,24-tr iazanonacos-1-yl]-4-hydroxy-2-hydroxymethylpyrrolidine
tggaggagccgagatttgcta

SEQ ID NO: 705 - RNA, 21 nt, synthetic construct
  source 1..21: mol_type = other RNA
  modified_base 1: mod_base = OTHER; note = 2'-O-methylguanosine-3'- phosphorothioate
  modified_base 2: mod_base = OTHER; note = 2'-O-methylguanosine-3'- phosphorothioate
  modified_base 3: mod_base = OTHER; note = 2'-O-methyladenosine-3'-phosphate
  modified_base 4: mod_base = OTHER; note = 2'-O-methylguanosine-3'-phosphate
  modified_base 5: mod_base = OTHER; note = 2'-O-methylguanosine-3'-phosphate
  modified_base 6: mod_base = OTHER; note = 2'-O-hexadecyl-adenosine-3'-phosphate
  modified_base 7: mod_base = OTHER; note = 2'-fluoroguanosine-3'-phosphate
  modified_base 8: mod_base = OTHER; note = 2'-O-methylcytidine-3'-phosphate
  modified_base 9: mod_base = OTHER; note = 2'-fluorocytidine-3'-phosphate
  modified_base 10: mod_base = OTHER; note = 2'-fluoroguanosine-3'-phosphate
  modified_base 11: mod_base = OTHER; note = 2'-fluoroadenosine-3'-phosphate
  modified_base 12: mod_base = OTHER; note = 2'-O-methylguanosine-3'-phosphate
  modified_base 13: mod_base = OTHER; note = 2'-O-methyladenosine-3'-phosphate
  modified_base 14: mod_base = OTHER; note = 2'-O-methyluridine-3'-phosphate
  modified_base 15: mod_base = OTHER; note = 2'-O-methyluridine-3'-phosphate
  modified_base 16: mod_base = OTHER; note = 2'-O-methyluridine-3'-phosphate
  modified_base 17: mod_base = OTHER; note = 2'-O-methylguanosine-3'-phosphate
  modified_base 18: mod_base = OTHER; note = 2'-O-methylcytidine-3'-phosphate
  modified_base 19: mod_base = OTHER; note = 2'-O-methyluridine-3'-phosphate
  modified_base 20: mod_base = OTHER; note = 2'-O-methylcytidine-3'-phosphate
  modified_base 21: mod_base = OTHER; note = 2'-O-methyladenosine-3'-phosphate N-[tris(GalNAc-alkyl)-amidodecanoyl)]-4-hydroxyprolinol Hyp-(GalNAc-alkyl)3 (2S,4R)-1-[29-[[2-(acetylamino)-2-deoxy-beta-D-galactopyran osyl]oxy]-14,14-bis[[3-[[3-[[5-[[2-(acetylamino)-2-deoxy-be ta-D-galactopyranosyl]oxy]-1-oxopentyl]amino]propyl]amino]- 3-oxopropoxy]methyl]-1,12,19,25-tetraoxo-16-oxa-13,20,24-tr iazanonacos-1-yl]-4-hydroxy-2-hydroxymethylpyrrolidine
ggaggagccgagatttgctca

SEQ ID NO: 706 - RNA, 21 nt, synthetic construct
  source 1..21: mol_type = other RNA
  modified_base 1: mod_base = OTHER; note = 2'-O-methylguanosine-3'- phosphorothioate
  modified_base 2: mod_base = OTHER; note = 2'-O-methylguanosine-3'- phosphorothioate
  modified_base 3: mod_base = OTHER; note = 2'-O-methyladenosine-3'-phosphate
  modified_base 4: mod_base = OTHER; note = 2'-O-methylguanosine-3'-phosphate
  modified_base 5: mod_base = OTHER; note = 2'-O-methylguanosine-3'-phosphate
  modified_base 6: mod_base = OTHER; note = 2'-O-hexadecyl-adenosine-3'-phosphate
  modified_base 7: mod_base = OTHER; note = 2'-O-methylguanosine-3'-phosphate
  modified_base 8: mod_base = OTHER; note = 2'-O-methylcytidine-3'-phosphate
  modified_base 9: mod_base = OTHER; note = 2'-fluorocytidine-3'-phosphate
  modified_base 10: mod_base = OTHER; note = 2'-fluoroguanosine-3'-phosphate
  modified_base 11: mod_base = OTHER; note = 2'-fluoroadenosine-3'-phosphate
  modified_base 12: mod_base = OTHER; note = 2'-O-methylguanosine-3'-phosphate
  modified_base 13: mod_base = OTHER; note = 2'-O-methyladenosine-3'-phosphate
  modified_base 14: mod_base = OTHER; note = 2'-O-methyluridine-3'-phosphate
  modified_base 15: mod_base = OTHER; note = 2'-O-methyluridine-3'-phosphate
  modified_base 16: mod_base = OTHER; note = 2'-O-methyluridine-3'-phosphate
  modified_base 17: mod_base = OTHER; note = 2'-O-methylguanosine-3'-phosphate
  modified_base 18: mod_base = OTHER; note = 2'-O-methylcytidine-3'-phosphate
  modified_base 19: mod_base = OTHER; note = 2'-O-methyluridine-3'-phosphate
  modified_base 20: mod_base = OTHER; note = 2'-O-methylcytidine-3'-phosphate
  modified_base 21: mod_base = OTHER; note = 2'-O-methyladenosine-3'-phosphate N-[tris(GalNAc-alkyl)-amidodecanoyl)]-4-hydroxyprolinol Hyp-(GalNAc-alkyl)3 (2S,4R)-1-[29-[[2-(acetylamino)-2-deoxy-beta-D-galactopyran osyl]oxy]-14,14-bis[[3-[[3-[[5-[[2-(acetylamino)-2-deoxy-be ta-D-galactopyranosyl]oxy]-1-oxopentyl]amino]propyl]amino]- 3-oxopropoxy]methyl]-1,12,19,25-tetraoxo-16-oxa-13,20,24-tr iazanonacos-1-yl]-4-hydroxy-2-hydroxymethylpyrrolidine
ggaggagccgagatttgctca

SEQ ID NO: 707 - RNA, 21 nt, synthetic construct
  source 1..21: mol_type = other RNA
  modified_base 1: mod_base = OTHER; note = 2'-O-methylguanosine-3'- phosphorothioate
  modified_base 2: mod_base = OTHER; note = 2'-O-methyladenosine-3'- phosphorothioate
  modified_base 3: mod_base = OTHER; note = 2'-O-methylguanosine-3'-phosphate
  modified_base 4: mod_base = OTHER; note = 2'-O-methylguanosine-3'-phosphate
  modified_base 5: mod_base = OTHER; note = 2'-O-methyladenosine-3'-phosphate
  modified_base 6: mod_base = OTHER; note = 2'-O-hexadecyl-guanosine-3'-phosphate
  modified_base 7: mod_base = OTHER; note = 2'-fluorocytidine-3'-phosphate
  modified_base 8: mod_base = OTHER; note = 2'-O-methylcytidine-3'-phosphate
  modified_base 9: mod_base = OTHER; note = 2'-fluoroguanosine-3'-phosphate
  modified_base 10: mod_base = OTHER; note = 2'-fluoroadenosine-3'-phosphate
  modified_base 11: mod_base = OTHER; note = 2'-fluoroguanosine-3'-phosphate
  modified_base 12: mod_base = OTHER; note = 2'-O-methyladenosine-3'-phosphate
  modified_base 13: mod_base = OTHER; note = 2'-O-methyluridine-3'-phosphate
  modified_base 14: mod_base = OTHER; note = 2'-O-methyluridine-3'-phosphate
  modified_base 15: mod_base = OTHER; note = 2'-O-methyluridine-3'-phosphate
  modified_base 16: mod_base = OTHER; note = 2'-O-methylguanosine-3'-phosphate
  modified_base 17: mod_base = OTHER; note = 2'-O-methylcytidine-3'-phosphate
  modified_base 18: mod_base = OTHER; note = 2'-O-methyluridine-3'-phosphate
  modified_base 19: mod_base = OTHER; note = 2'-O-methylcytidine-3'-phosphate
  modified_base 20: mod_base = OTHER; note = 2'-O-methyladenosine-3'-phosphate
  modified_base 21: mod_base = OTHER; note = 2'-O-methyladenosine-3'-phosphate N-[tris(GalNAc-alkyl)-amidodecanoyl)]-4-hydroxyprolinol Hyp-(GalNAc-alkyl)3 (2S,4R)-1-[29-[[2-(acetylamino)-2-deoxy-beta-D-galactopyran osyl]oxy]-14,14-bis[[3-[[3-[[5-[[2-(acetylamino)-2-deoxy-be ta-D-galactopyranosyl]oxy]-1-oxopentyl]amino]propyl]amino]- 3-oxopropoxy]methyl]-1,12,19,25-tetraoxo-16-oxa-13,20,24-tr iazanonacos-1-yl]-4-hydroxy-2-hydroxymethylpyrrolidine
gaggagccgagatttgctcaa

SEQ ID NO: 708 - RNA, 21 nt, synthetic construct
  source 1..21: mol_type = other RNA
  modified_base 1: mod_base = OTHER; note = 2'-O-methylguanosine-3'- phosphorothioate
  modified_base 2: mod_base = OTHER; note = 2'-O-methyladenosine-3'- phosphorothioate
  modified_base 3: mod_base = OTHER; note = 2'-O-methylguanosine-3'-phosphate
  modified_base 4: mod_base = OTHER; note = 2'-O-methylcytidine-3'-phosphate
  modified_base 5: mod_base = OTHER; note = 2'-O-methylcytidine-3'-phosphate
  modified_base 6: mod_base = OTHER; note = 2'-O-hexadecyl-guanosine-3'-phosphate
  modified_base 7: mod_base = OTHER; note = 2'-fluoroadenosine-3'-phosphate
  modified_base 8: mod_base = OTHER; note = 2'-O-methylguanosine-3'-phosphate
  modified_base 9: mod_base = OTHER; note = 2'-fluoroadenosine-3'-phosphate
  modified_base 10: mod_base = OTHER; note = 2'-fluorouridine-3'-phosphate
  modified_base 11: mod_base = OTHER; note = 2'-fluorouridine-3'-phosphate
  modified_base 12: mod_base = OTHER; note = 2'-O-methyluridine-3'-phosphate
  modified_base 13: mod_base = OTHER; note = 2'-O-methylguanosine-3'-phosphate
  modified_base 14: mod_base = OTHER; note = 2'-O-methylcytidine-3'-phosphate
  modified_base 15: mod_base = OTHER; note = 2'-O-methyluridine-3'-phosphate
  modified_base 16: mod_base = OTHER; note = 2'-O-methylcytidine-3'-phosphate
  modified_base 17: mod_base = OTHER; note = 2'-O-methyladenosine-3'-phosphate
  modified_base 18: mod_base = OTHER; note = 2'-O-methylguanosine-3'-phosphate
  modified_base 19: mod_base = OTHER; note = 2'-O-methyluridine-3'-phosphate
  modified_base 20: mod_base = OTHER; note = 2'-O-methylguanosine-3'-phosphate
  modified_base 21: mod_base = OTHER; note = 2'-O-methyladenosine-3'-phosphate N-[tris(GalNAc-alkyl)-amidodecanoyl)]-4-hydroxyprolinol Hyp-(GalNAc-alkyl)3 (2S,4R)-1-[29-[[2-(acetylamino)-2-deoxy-beta-D-galactopyran osyl]oxy]-14,14-bis[[3-[[3-[[5-[[2-(acetylamino)-2-deoxy-be ta-D-galactopyranosyl]oxy]-1-oxopentyl]amino]propyl]amino]- 3-oxopropoxy]methyl]-1,12,19,25-tetraoxo-16-oxa-13,20,24-tr iazanonacos-1-yl]-4-hydroxy-2-hydroxymethylpyrrolidine
gagccgagatttgctcagtga

SEQ ID NO: 709 - RNA, 21 nt, synthetic construct
  source 1..21: mol_type = other RNA
  modified_base 1: mod_base = OTHER; note = 2'-O-methylguanosine-3'- phosphorothioate
  modified_base 2: mod_base = OTHER; note = 2'-O-methylcytidine-3'- phosphorothioate
  modified_base 3: mod_base = OTHER; note = 2'-O-methylcytidine-3'-phosphate
  modified_base 4: mod_base = OTHER; note = 2'-O-methylguanosine-3'-phosphate
  modified_base 5: mod_base = OTHER; note = 2'-O-methyladenosine-3'-phosphate
  modified_base 6: mod_base = OTHER; note = 2'-O-hexadecyl-guanosine-3'-phosphate
  modified_base 7: mod_base = OTHER; note = 2'-fluoroadenosine-3'-phosphate
  modified_base 8: mod_base = OTHER; note = 2'-O-methyluridine-3'-phosphate
  modified_base 9: mod_base = OTHER; note = 2'-fluorouridine-3'-phosphate
  modified_base 10: mod_base = OTHER; note = 2'-fluorouridine-3'-phosphate
  modified_base 11: mod_base = OTHER; note = 2'-fluoroguanosine-3'-phosphate
  modified_base 12: mod_base = OTHER; note = 2'-O-methylcytidine-3'-phosphate
  modified_base 13: mod_base = OTHER; note = 2'-O-methyluridine-3'-phosphate
  modified_base 14: mod_base = OTHER; note = 2'-O-methylcytidine-3'-phosphate
  modified_base 15: mod_base = OTHER; note = 2'-O-methyladenosine-3'-phosphate
  modified_base 16: mod_base = OTHER; note = 2'-O-methylguanosine-3'-phosphate
  modified_base 17: mod_base = OTHER; note = 2'-O-methyluridine-3'-phosphate
  modified_base 18: mod_base = OTHER; note = 2'-O-methylguanosine-3'-phosphate
  modified_base 19: mod_base = OTHER; note = 2'-O-methylcytidine-3'-phosphate
  modified_base 20: mod_base = OTHER; note = 2'-O-methylcytidine-3'-phosphate
  modified_base 21: mod_base = OTHER; note = 2'-O-methyladenosine-3'-phosphate N-[tris(GalNAc-alkyl)-amidodecanoyl)]-4-hydroxyprolinol Hyp-(GalNAc-alkyl)3 (2S,4R)-1-[29-[[2-(acetylamino)-2-deoxy-beta-D-galactopyran osyl]oxy]-14,14-bis[[3-[[3-[[5-[[2-(acetylamino)-2-deoxy-be ta-D-galactopyranosyl]oxy]-1-oxopentyl]amino]propyl]amino]- 3-oxopropoxy]methyl]-1,12,19,25-tetraoxo-16-oxa-13,20,24-tr iazanonacos-1-yl]-4-hydroxy-2-hydroxymethylpyrrolidine
gccgagatttgctcagtgcca

SEQ ID NO: 710 - RNA, 21 nt, synthetic construct
  source 1..21: mol_type = other RNA
  modified_base 1: mod_base = OTHER; note = 2'-O-methylcytidine-3'- phosphorothioate
  modified_base 2: mod_base = OTHER; note = 2'-O-methylguanosine-3'- phosphorothioate
  modified_base 3: mod_base = OTHER; note = 2'-O-methyladenosine-3'-phosphate
  modified_base 4: mod_base = OTHER; note = 2'-O-methylguanosine-3'-phosphate
  modified_base 5: mod_base = OTHER; note = 2'-O-methyladenosine-3'-phosphate
  modified_base 6: mod_base = OTHER; note = 2'-O-hexadecyl-uridine-3'-phosphate
  modified_base 7: mod_base = OTHER; note = 2'-fluorouridine-3'-phosphate
  modified_base 8: mod_base = OTHER; note = 2'-O-methyluridine-3'-phosphate
  modified_base 9: mod_base = OTHER; note = 2'-fluoroguanosine-3'-phosphate
  modified_base 10: mod_base = OTHER; note = 2'-fluorocytidine-3'-phosphate
  modified_base 11: mod_base = OTHER; note = 2'-fluorouridine-3'-phosphate
  modified_base 12: mod_base = OTHER; note = 2'-O-methylcytidine-3'-phosphate
  modified_base 13: mod_base = OTHER; note = 2'-O-methyladenosine-3'-phosphate
  modified_base 14: mod_base = OTHER; note = 2'-O-methylguanosine-3'-phosphate
  modified_base 15: mod_base = OTHER; note = 2'-O-methyluridine-3'-phosphate
  modified_base 16: mod_base = OTHER; note = 2'-O-methylguanosine-3'-phosphate
  modified_base 17: mod_base = OTHER; note = 2'-O-methylcytidine-3'-phosphate
  modified_base 18: mod_base = OTHER; note = 2'-O-methylcytidine-3'-phosphate
  modified_base 19: mod_base = OTHER; note = 2'-O-methyladenosine-3'-phosphate
  modified_base 20: mod_base = OTHER; note = 2'-O-methylcytidine-3'-phosphate
  modified_base 21: mod_base = OTHER; note = 2'-O-methyladenosine-3'-phosphate N-[tris(GalNAc-alkyl)-amidodecanoyl)]-4-hydroxyprolinol Hyp-(GalNAc-alkyl)3 (2S,4R)-1-[29-[[2-(acetylamino)-2-deoxy-beta-D-galactopyran osyl]oxy]-14,14-bis[[3-[[3-[[5-[[2-(acetylamino)-2-deoxy-be ta-D-galactopyranosyl]oxy]-1-oxopentyl]amino]propyl]amino]- 3-oxopropoxy]methyl]-1,12,19,25-tetraoxo-16-oxa-13,20,24-tr iazanonacos-1-yl]-4-hydroxy-2-hydroxymethylpyrrolidine
cgagatttgctcagtgccaca

SEQ ID NO: 711 - RNA, 21 nt, synthetic construct
  source 1..21: mol_type = other RNA
  modified_base 1: mod_base = OTHER; note = 2'-O-methyladenosine-3'- phosphorothioate
  modified_base 2: mod_base = OTHER; note = 2'-O-methyluridine-3'-phosphorothioate
  modified_base 3: mod_base = OTHER; note = 2'-O-methyluridine-3'-phosphate
  modified_base 4: mod_base = OTHER; note = 2'-O-methyluridine-3'-phosphate
  modified_base 5: mod_base = OTHER; note = 2'-O-methylguanosine-3'-phosphate
  modified_base 6: mod_base = OTHER; note = 2'-O-hexadecyl-cytidine-3'-phosphate
  modified_base 7: mod_base = OTHER; note = 2'-fluorouridine-3'-phosphate
  modified_base 8: mod_base = OTHER; note = 2'-O-methylcytidine-3'-phosphate
  modified_base 9: mod_base = OTHER; note = 2'-fluoroadenosine-3'-phosphate
  modified_base 10: mod_base = OTHER; note = 2'-fluoroguanosine-3'-phosphate
  modified_base 11: mod_base = OTHER; note = 2'-fluorouridine-3'-phosphate
  modified_base 12: mod_base = OTHER; note = 2'-O-methylguanosine-3'-phosphate
  modified_base 13: mod_base = OTHER; note = 2'-O-methylcytidine-3'-phosphate
  modified_base 14: mod_base = OTHER; note = 2'-O-methylcytidine-3'-phosphate
  modified_base 15: mod_base = OTHER; note = 2'-O-methyladenosine-3'-phosphate
  modified_base 16: mod_base = OTHER; note = 2'-O-methylcytidine-3'-phosphate
  modified_base 17: mod_base = OTHER; note = 2'-O-methyluridine-3'-phosphate
  modified_base 18: mod_base = OTHER; note = 2'-O-methyluridine-3'-phosphate
  modified_base 19: mod_base = OTHER; note = 2'-O-methylcytidine-3'-phosphate
  modified_base 20: mod_base = OTHER; note = 2'-O-methylcytidine-3'-phosphate
  modified_base 21: mod_base = OTHER; note = 2'-O-methyladenosine-3'-phosphate N-[tris(GalNAc-alkyl)-amidodecanoyl)]-4-hydroxyprolinol Hyp-(GalNAc-alkyl)3 (2S,4R)-1-[29-[[2-(acetylamino)-2-deoxy-beta-D-galactopyran osyl]oxy]-14,14-bis[[3-[[3-[[5-[[2-(acetylamino)-2-deoxy-be ta-D-galactopyranosyl]oxy]-1-oxopentyl]amino]propyl]amino]- 3-oxopropoxy]methyl]-1,12,19,25-tetraoxo-16-oxa-13,20,24-tr iazanonacos-1-yl]-4-hydroxy-2-hydroxymethylpyrrolidine
atttgctcagtgccacttcca

SEQ ID NO: 712 - RNA, 21 nt, synthetic construct
  source 1..21: mol_type = other RNA
  modified_base 1: mod_base = OTHER; note = 2'-O-methyluridine-3'-phosphorothioate
  modified_base 2: mod_base = OTHER; note = 2'-O-methyluridine-3'-phosphorothioate
  modified_base 3: mod_base = OTHER; note = 2'-O-methylguanosine-3'-phosphate
  modified_base 4: mod_base = OTHER; note = 2'-O-methylcytidine-3'-phosphate
  modified_base 5: mod_base = OTHER; note = 2'-O-methyluridine-3'-phosphate
  modified_base 6: mod_base = OTHER; note = 2'-O-hexadecyl-cytidine-3'-phosphate
  modified_base 7: mod_base = OTHER; note = 2'-fluoroadenosine-3'-phosphate
  modified_base 8: mod_base = OTHER; note = 2'-O-methylguanosine-3'-phosphate
  modified_base 9: mod_base = OTHER; note = 2'-fluorouridine-3'-phosphate
  modified_base 10: mod_base = OTHER; note = 2'-fluoroguanosine-3'-phosphate
  modified_base 11: mod_base = OTHER; note = 2'-fluorocytidine-3'-phosphate
  modified_base 12: mod_base = OTHER; note = 2'-O-methylcytidine-3'-phosphate
  modified_base 13: mod_base = OTHER; note = 2'-O-methyladenosine-3'-phosphate
  modified_base 14: mod_base = OTHER; note = 2'-O-methylcytidine-3'-phosphate
  modified_base 15: mod_base = OTHER; note = 2'-O-methyluridine-3'-phosphate
  modified_base 16: mod_base = OTHER; note = 2'-O-methyluridine-3'-phosphate
  modified_base 17: mod_base = OTHER; note = 2'-O-methylcytidine-3'-phosphate
  modified_base 18: mod_base = OTHER; note = 2'-O-methylcytidine-3'-phosphate
  modified_base 19: mod_base = OTHER; note = 2'-O-methylcytidine-3'-phosphate
  modified_base 20: mod_base = OTHER; note = 2'-O-methyluridine-3'-phosphate
  modified_base 21: mod_base = OTHER; note = 2'-O-methyladenosine-3'-phosphate N-[tris(GalNAc-alkyl)-amidodecanoyl)]-4-hydroxyprolinol Hyp-(GalNAc-alkyl)3 (2S,4R)-1-[29-[[2-(acetylamino)-2-deoxy-beta-D-galactopyran osyl]oxy]-14,14-bis[[3-[[3-[[5-[[2-(acetylamino)-2-deoxy-be ta-D-galactopyranosyl]oxy]-1-oxopentyl]amino]propyl]amino]- 3-oxopropoxy]methyl]-1,12,19,25-tetraoxo-16-oxa-13,20,24-tr iazanonacos-1-yl]-4-hydroxy-2-hydroxymethylpyrrolidine
ttgctcagtgccacttcccta

SEQ ID NO: 713 - RNA, 21 nt, synthetic construct
  source 1..21: mol_type = other RNA
  modified_base 1: mod_base = OTHER; note = 2'-O-methyluridine-3'-phosphorothioate
  modified_base 2: mod_base = OTHER; note = 2'-O-methyluridine-3'-phosphorothioate
  modified_base 3: mod_base = OTHER; note = 2'-O-methylguanosine-3'-phosphate
  modified_base 4: mod_base = OTHER; note = 2'-O-methylcytidine-3'-phosphate
  modified_base 5: mod_base = OTHER; note = 2'-O-methyluridine-3'-phosphate
  modified_base 6: mod_base = OTHER; note = 2'-O-hexadecyl-cytidine-3'-phosphate
  modified_base 7: mod_base = OTHER; note = 2'-O-methyladenosine-3'-phosphate
  modified_base 8: mod_base = OTHER; note = 2'-O-methylguanosine-3'-phosphate
  modified_base 9: mod_base = OTHER; note = 2'-fluorouridine-3'-phosphate
  modified_base 10: mod_base = OTHER; note = 2'-fluoroguanosine-3'-phosphate
  modified_base 11: mod_base = OTHER; note = 2'-fluorocytidine-3'-phosphate
  modified_base 12: mod_base = OTHER; note = 2'-O-methylcytidine-3'-phosphate
  modified_base 13: mod_base = OTHER; note = 2'-O-methyladenosine-3'-phosphate
  modified_base 14: mod_base = OTHER; note = 2'-O-methylcytidine-3'-phosphate
  modified_base 15: mod_base = OTHER; note = 2'-O-methyluridine-3'-phosphate
  modified_base 16: mod_base = OTHER; note = 2'-O-methyluridine-3'-phosphate
  modified_base 17: mod_base = OTHER; note = 2'-O-methylcytidine-3'-phosphate
  modified_base 18: mod_base = OTHER; note = 2'-O-methylcytidine-3'-phosphate
  modified_base 19: mod_base = OTHER; note = 2'-O-methylcytidine-3'-phosphate
  modified_base 20: mod_base = OTHER; note = 2'-O-methyluridine-3'-phosphate
  modified_base 21: mod_base = OTHER; note = 2'-O-methyladenosine-3'-phosphate N-[tris(GalNAc-alkyl)-amidodecanoyl)]-4-hydroxyprolinol Hyp-(GalNAc-alkyl)3 (2S,4R)-1-[29-[[2-(acetylamino)-2-deoxy-beta-D-galactopyran osyl]oxy]-14,14-bis[[3-[[3-[[5-[[2-(acetylamino)-2-deoxy-be ta-D-galactopyranosyl]oxy]-1-oxopentyl]amino]propyl]amino]- 3-oxopropoxy]methyl]-1,12,19,25-tetraoxo-16-oxa-13,20,24-tr iazanonacos-1-yl]-4-hydroxy-2-hydroxymethylpyrrolidine
ttgctcagtgccacttcccta

SEQ ID NO: 714 - RNA, 21 nt, synthetic construct
  source 1..21: mol_type = other RNA
  modified_base 1: mod_base = OTHER; note = 2'-O-methyluridine-3'-phosphorothioate
  modified_base 2: mod_base = OTHER; note = 2'-O-methylguanosine-3'- phosphorothioate
  modified_base 3: mod_base = OTHER; note = 2'-O-methylcytidine-3'-phosphate
  modified_base 4: mod_base = OTHER; note = 2'-O-methyluridine-3'-phosphate
  modified_base 5: mod_base = OTHER; note = 2'-O-methylcytidine-3'-phosphate
  modified_base 6: mod_base = OTHER; note = 2'-O-hexadecyl-adenosine-3'-phosphate
  modified_base 7: mod_base = OTHER; note = 2'-fluoroguanosine-3'-phosphate
  modified_base 8: mod_base = OTHER; note = 2'-O-methyluridine-3'-phosphate
  modified_base 9: mod_base = OTHER; note = 2'-fluoroguanosine-3'-phosphate
  modified_base 10: mod_base = OTHER; note = 2'-fluorocytidine-3'-phosphate
  modified_base 11: mod_base = OTHER; note = 2'-fluorocytidine-3'-phosphate
  modified_base 12: mod_base = OTHER; note = 2'-O-methyladenosine-3'-phosphate
  modified_base 13: mod_base = OTHER; note = 2'-O-methylcytidine-3'-phosphate
  modified_base 14: mod_base = OTHER; note = 2'-O-methyluridine-3'-phosphate
  modified_base 15: mod_base = OTHER; note = 2'-O-methyluridine-3'-phosphate
  modified_base 16: mod_base = OTHER; note = 2'-O-methylcytidine-3'-phosphate
  modified_base 17: mod_base = OTHER; note = 2'-O-methylcytidine-3'-phosphate
  modified_base 18: mod_base = OTHER; note = 2'-O-methylcytidine-3'-phosphate
  modified_base 19: mod_base = OTHER; note = 2'-O-methyluridine-3'-phosphate
  modified_base 20: mod_base = OTHER; note = 2'-O-methylcytidine-3'-phosphate
  modified_base 21: mod_base = OTHER; note = 2'-O-methyladenosine-3'-phosphate N-[tris(GalNAc-alkyl)-amidodecanoyl)]-4-hydroxyprolinol Hyp-(GalNAc-alkyl)3 (2S,4R)-1-[29-[[2-(acetylamino)-2-deoxy-beta-D-galactopyran osyl]oxy]-14,14-bis[[3-[[3-[[5-[[2-(acetylamino)-2-deoxy-be ta-D-galactopyranosyl]oxy]-1-oxopentyl]amino]propyl]amino]- 3-oxopropoxy]methyl]-1,12,19,25-tetraoxo-16-oxa-13,20,24-tr iazanonacos-1-yl]-4-hydroxy-2-hydroxymethylpyrrolidine
tgctcagtgccacttccctca

SEQ ID NO: 715 - RNA, 21 nt, synthetic construct
  source 1..21: mol_type = other RNA
  modified_base 1: mod_base = OTHER; note = 2'-O-methyluridine-3'-phosphorothioate
  modified_base 2: mod_base = OTHER; note = 2'-O-methylguanosine-3'- phosphorothioate
  modified_base 3: mod_base = OTHER; note = 2'-O-methylcytidine-3'-phosphate
  modified_base 4: mod_base = OTHER; note = 2'-O-methyluridine-3'-phosphate
  modified_base 5: mod_base = OTHER; note = 2'-O-methylcytidine-3'-phosphate
  modified_base 6: mod_base = OTHER; note = 2'-O-hexadecyl-adenosine-3'-phosphate
  modified_base 7: mod_base = OTHER; note = 2'-O-methylguanosine-3'-phosphate
  modified_base 8: mod_base = OTHER; note = 2'-O-methyluridine-3'-phosphate
  modified_base 9: mod_base = OTHER; note = 2'-fluoroguanosine-3'-phosphate
  modified_base 10: mod_base = OTHER; note = 2'-fluorocytidine-3'-phosphate
  modified_base 11: mod_base = OTHER; note = 2'-fluorocytidine-3'-phosphate
  modified_base 12: mod_base = OTHER; note = 2'-O-methyladenosine-3'-phosphate
  modified_base 13: mod_base = OTHER; note = 2'-O-methylcytidine-3'-phosphate
  modified_base 14: mod_base = OTHER; note = 2'-O-methyluridine-3'-phosphate
  modified_base 15: mod_base = OTHER; note = 2'-O-methyluridine-3'-phosphate
  modified_base 16: mod_base = OTHER; note = 2'-O-methylcytidine-3'-phosphate
  modified_base 17: mod_base = OTHER; note = 2'-O-methylcytidine-3'-phosphate
  modified_base 18: mod_base = OTHER; note = 2'-O-methylcytidine-3'-phosphate
  modified_base 19: mod_base = OTHER; note = 2'-O-methyluridine-3'-phosphate
  modified_base 20: mod_base = OTHER; note = 2'-O-methylcytidine-3'-phosphate
  modified_base 21: mod_base = OTHER; note = 2'-O-methyladenosine-3'-phosphate N-[tris(GalNAc-alkyl)-amidodecanoyl)]-4-hydroxyprolinol Hyp-(GalNAc-alkyl)3 (2S,4R)-1-[29-[[2-(acetylamino)-2-deoxy-beta-D-galactopyran osyl]oxy]-14,14-bis[[3-[[3-[[5-[[2-(acetylamino)-2-deoxy-be ta-D-galactopyranosyl]oxy]-1-oxopentyl]amino]propyl]amino]- 3-oxopropoxy]methyl]-1,12,19,25-tetraoxo-16-oxa-13,20,24-tr iazanonacos-1-yl]-4-hydroxy-2-hydroxymethylpyrrolidine
tgctcagtgccacttccctca

SEQ ID NO: 716 - RNA, 21 nt, synthetic construct
  source 1..21: mol_type = other RNA
  modified_base 1: mod_base = OTHER; note = 2'-O-methyladenosine-3'- phosphorothioate
  modified_base 2: mod_base = OTHER; note = 2'-O-methylguanosine-3'- phosphorothioate
  modified_base 3: mod_base = OTHER; note = 2'-O-methyluridine-3'-phosphate
  modified_base 4: mod_base = OTHER; note = 2'-O-methylguanosine-3'-phosphate
  modified_base 5: mod_base = OTHER; note = 2'-O-methylcytidine-3'-phosphate
  modified_base 6: mod_base = OTHER; note = 2'-O-hexadecyl-cytidine-3'-phosphate
  modified_base 7: mod_base = OTHER; note = 2'-fluoroadenosine-3'-phosphate
  modified_base 8: mod_base = OTHER; note = 2'-O-methylcytidine-3'-phosphate
  modified_base 9: mod_base = OTHER; note = 2'-fluorouridine-3'-phosphate
  modified_base 10: mod_base = OTHER; note = 2'-fluorouridine-3'-phosphate
  modified_base 11: mod_base = OTHER; note = 2'-fluorocytidine-3'-phosphate
  modified_base 12: mod_base = OTHER; note = 2'-O-methylcytidine-3'-phosphate
  modified_base 13: mod_base = OTHER; note = 2'-O-methylcytidine-3'-phosphate
  modified_base 14: mod_base = OTHER; note = 2'-O-methyluridine-3'-phosphate
  modified_base 15: mod_base = OTHER; note = 2'-O-methylcytidine-3'-phosphate
  modified_base 16: mod_base = OTHER; note = 2'-O-methyluridine-3'-phosphate
  modified_base 17: mod_base = OTHER; note = 2'-O-methyluridine-3'-phosphate
  modified_base 18: mod_base = OTHER; note = 2'-O-methylcytidine-3'-phosphate
  modified_base 19: mod_base = OTHER; note = 2'-O-methyluridine-3'-phosphate
  modified_base 20: mod_base = OTHER; note = 2'-O-methyladenosine-3'-phosphate
  modified_base 21: mod_base = OTHER; note = 2'-O-methyladenosine-3'-phosphate N-[tris(GalNAc-alkyl)-amidodecanoyl)]-4-hydroxyprolinol Hyp-(GalNAc-alkyl)3 (2S,4R)-1-[29-[[2-(acetylamino)-2-deoxy-beta-D-galactopyran osyl]oxy]-14,14-bis[[3-[[3-[[5-[[2-(acetylamino)-2-deoxy-be ta-D-galactopyranosyl]oxy]-1-oxopentyl]amino]propyl]amino]- 3-oxopropoxy]methyl]-1,12,19,25-tetraoxo-16-oxa-13,20,24-tr iazanonacos-1-yl]-4-hydroxy-2-hydroxymethylpyrrolidine
agtgccacttccctcttctaa

SEQ ID NO: 717 - RNA, 21 nt, synthetic construct
  source 1..21: mol_type = other RNA
  modified_base 1: mod_base = OTHER; note = 2'-O-methyladenosine-3'- phosphorothioate
  modified_base 2: mod_base = OTHER; note = 2'-O-methylguanosine-3'- phosphorothioate
  modified_base 3: mod_base = OTHER; note = 2'-O-methyluridine-3'-phosphate
  modified_base 4: mod_base = OTHER; note = 2'-O-methylguanosine-3'-phosphate
  modified_base 5: mod_base = OTHER; note = 2'-O-methylcytidine-3'-phosphate
  modified_base 6: mod_base = OTHER; note = 2'-O-hexadecyl-cytidine-3'-phosphate
  modified_base 7: mod_base = OTHER; note = 2'-O-methyladenosine-3'-phosphate
  modified_base 8: mod_base = OTHER; note = 2'-O-methylcytidine-3'-phosphate
  modified_base 9: mod_base = OTHER; note = 2'-fluorouridine-3'-phosphate
  modified_base 10: mod_base = OTHER; note = 2'-fluorouridine-3'-phosphate
  modified_base 11: mod_base = OTHER; note = 2'-fluorocytidine-3'-phosphate
  modified_base 12: mod_base = OTHER; note = 2'-O-methylcytidine-3'-phosphate
  modified_base 13: mod_base = OTHER; note = 2'-O-methylcytidine-3'-phosphate
  modified_base 14: mod_base = OTHER; note = 2'-O-methyluridine-3'-phosphate
  modified_base 15: mod_base = OTHER; note = 2'-O-methylcytidine-3'-phosphate
  modified_base 16: mod_base = OTHER; note = 2'-O-methyluridine-3'-phosphate
  modified_base 17: mod_base = OTHER; note = 2'-O-methyluridine-3'-phosphate
  modified_base 18: mod_base = OTHER; note = 2'-O-methylcytidine-3'-phosphate
  modified_base 19: mod_base = OTHER; note = 2'-O-methyluridine-3'-phosphate
  modified_base 20: mod_base = OTHER; note = 2'-O-methyladenosine-3'-phosphate
  modified_base 21: mod_base = OTHER; note = 2'-O-methyladenosine-3'-phosphate N-[tris(GalNAc-alkyl)-amidodecanoyl)]-4-hydroxyprolinol Hyp-(GalNAc-alkyl)3 (2S,4R)-1-[29-[[2-(acetylamino)-2-deoxy-beta-D-galactopyran osyl]oxy]-14,14-bis[[3-[[3-[[5-[[2-(acetylamino)-2-deoxy-be ta-D-galactopyranosyl]oxy]-1-oxopentyl]amino]propyl]amino]- 3-oxopropoxy]methyl]-1,12,19,25-tetraoxo-16-oxa-13,20,24-tr iazanonacos-1-yl]-4-hydroxy-2-hydroxymethylpyrrolidine
agtgccacttccctcttctaa

SEQ ID NO: 718 - RNA, 21 nt, synthetic construct
  source 1..21: mol_type = other RNA
  modified_base 1: mod_base = OTHER; note = 2'-O-methylguanosine-3'- phosphorothioate
  modified_base 2: mod_base = OTHER; note = 2'-O-methylcytidine-3'- phosphorothioate
  modified_base 3: mod_base = OTHER; note = 2'-O-methylcytidine-3'-phosphate
  modified_base 4: mod_base = OTHER; note = 2'-O-methyladenosine-3'-phosphate
  modified_base 5: mod_base = OTHER; note = 2'-O-methylcytidine-3'-phosphate
  modified_base 6: mod_base = OTHER; note = 2'-O-hexadecyl-uridine-3'-phosphate
  modified_base 7: mod_base = OTHER; note = 2'-fluorouridine-3'-phosphate
  modified_base 8: mod_base = OTHER; note = 2'-O-methylcytidine-3'-phosphate
  modified_base 9: mod_base = OTHER; note = 2'-fluorocytidine-3'-phosphate
  modified_base 10: mod_base = OTHER; note = 2'-fluorocytidine-3'-phosphate
  modified_base 11: mod_base = OTHER; note = 2'-fluorouridine-3'-phosphate
  modified_base 12: mod_base = OTHER; note = 2'-O-methylcytidine-3'-phosphate
  modified_base 13: mod_base = OTHER; note = 2'-O-methyluridine-3'-phosphate
  modified_base 14: mod_base = OTHER; note = 2'-O-methyluridine-3'-phosphate
  modified_base 15: mod_base = OTHER; note = 2'-O-methylcytidine-3'-phosphate
  modified_base 16: mod_base = OTHER; note = 2'-O-methyluridine-3'-phosphate
  modified_base 17: mod_base = OTHER; note = 2'-O-methyladenosine-3'-phosphate
  modified_base 18: mod_base = OTHER; note = 2'-O-methylguanosine-3'-phosphate
  modified_base 19: mod_base = OTHER; note = 2'-O-methyluridine-3'-phosphate
  modified_base 20: mod_base = OTHER; note = 2'-O-methylcytidine-3'-phosphate
  modified_base 21: mod_base = OTHER; note = 2'-O-methyladenosine-3'-phosphate N-[tris(GalNAc-alkyl)-amidodecanoyl)]-4-hydroxyprolinol Hyp-(GalNAc-alkyl)3 (2S,4R)-1-[29-[[2-(acetylamino)-2-deoxy-beta-D-galactopyran osyl]oxy]-14,14-bis[[3-[[3-[[5-[[2-(acetylamino)-2-deoxy-be ta-D-galactopyranosyl]oxy]-1-oxopentyl]amino]propyl]amino]- 3-oxopropoxy]methyl]-1,12,19,25-tetraoxo-16-oxa-13,20,24-tr iazanonacos-1-yl]-4-hydroxy-2-hydroxymethylpyrrolidine
gccacttccctcttctagtca

SEQ ID NO: 719 - RNA, 21 nt, synthetic construct
  source 1..21: mol_type = other RNA
  modified_base 1: mod_base = OTHER; note = 2'-O-methylguanosine-3'- phosphorothioate
  modified_base 2: mod_base = OTHER; note = 2'-O-methylcytidine-3'- phosphorothioate
  modified_base 3: mod_base = OTHER; note = 2'-O-methylcytidine-3'-phosphate
  modified_base 4: mod_base = OTHER; note = 2'-O-methyladenosine-3'-phosphate
  modified_base 5: mod_base = OTHER; note = 2'-O-methylcytidine-3'-phosphate
  modified_base 6: mod_base = OTHER; note = 2'-O-hexadecyl-uridine-3'-phosphate
  modified_base 7: mod_base = OTHER; note = 2'-O-methyluridine-3'-phosphate
  modified_base 8: mod_base = OTHER; note = 2'-O-methylcytidine-3'-phosphate
  modified_base 9: mod_base = OTHER; note = 2'-fluorocytidine-3'-phosphate
  modified_base 10: mod_base = OTHER; note = 2'-fluorocytidine-3'-phosphate
  modified_base 11: mod_base = OTHER; note = 2'-fluorouridine-3'-phosphate
  modified_base 12: mod_base = OTHER; note = 2'-O-methylcytidine-3'-phosphate
  modified_base 13: mod_base = OTHER; note = 2'-O-methyluridine-3'-phosphate
  modified_base 14: mod_base = OTHER; note = 2'-O-methyluridine-3'-phosphate
  modified_base 15: mod_base = OTHER; note = 2'-O-methylcytidine-3'-phosphate
  modified_base 16: mod_base = OTHER; note = 2'-O-methyluridine-3'-phosphate
  modified_base 17: mod_base = OTHER; note = 2'-O-methyladenosine-3'-phosphate
  modified_base 18: mod_base = OTHER; note = 2'-O-methylguanosine-3'-phosphate
  modified_base 19: mod_base = OTHER; note = 2'-O-methyluridine-3'-phosphate
  modified_base 20: mod_base = OTHER; note = 2'-O-methylcytidine-3'-phosphate
  modified_base 21: mod_base = OTHER; note = 2'-O-methyladenosine-3'-phosphate N-[tris(GalNAc-alkyl)-amidodecanoyl)]-4-hydroxyprolinol Hyp-(GalNAc-alkyl)3 (2S,4R)-1-[29-[[2-(acetylamino)-2-deoxy-beta-D-galactopyran osyl]oxy]-14,14-bis[[3-[[3-[[5-[[2-(acetylamino)-2-deoxy-be ta-D-galactopyranosyl]oxy]-1-oxopentyl]amino]propyl]amino]- 3-oxopropoxy]methyl]-1,12,19,25-tetraoxo-16-oxa-13,20,24-tr iazanonacos-1-yl]-4-hydroxy-2-hydroxymethylpyrrolidine
gccacttccctcttctagtca

SEQ ID NO: 720 - RNA, 21 nt, synthetic construct
  source 1..21: mol_type = other RNA
  modified_base 1: mod_base = OTHER; note = 2'-O-methylcytidine-3'- phosphorothioate
  modified_base 2: mod_base = OTHER; note = 2'-O-methylcytidine-3'- phosphorothioate
  modified_base 3: mod_base = OTHER; note = 2'-O-methyladenosine-3'-phosphate
  modified_base 4: mod_base = OTHER; note = 2'-O-methylcytidine-3'-phosphate
  modified_base 5: mod_base = OTHER; note = 2'-O-methyluridine-3'-phosphate
  modified_base 6: mod_base = OTHER; note = 2'-O-hexadecyl-uridine-3'-phosphate
  modified_base 7: mod_base = OTHER; note = 2'-fluorocytidine-3'-phosphate
  modified_base 8: mod_base = OTHER; note = 2'-O-methylcytidine-3'-phosphate
  modified_base 9: mod_base = OTHER; note = 2'-fluorocytidine-3'-phosphate
  modified_base 10: mod_base = OTHER; note = 2'-fluorouridine-3'-phosphate
  modified_base 11: mod_base = OTHER; note = 2'-fluorocytidine-3'-phosphate
  modified_base 12: mod_base = OTHER; note = 2'-O-methyluridine-3'-phosphate
  modified_base 13: mod_base = OTHER; note = 2'-O-methyluridine-3'-phosphate
  modified_base 14: mod_base = OTHER; note = 2'-O-methylcytidine-3'-phosphate
  modified_base 15: mod_base = OTHER; note = 2'-O-methyluridine-3'-phosphate
  modified_base 16: mod_base = OTHER; note = 2'-O-methyladenosine-3'-phosphate
  modified_base 17: mod_base = OTHER; note = 2'-O-methylguanosine-3'-phosphate
  modified_base 18: mod_base = OTHER; note = 2'-O-methyluridine-3'-phosphate
  modified_base 19: mod_base = OTHER; note = 2'-O-methylcytidine-3'-phosphate
  modified_base 20: mod_base = OTHER; note = 2'-O-methyluridine-3'-phosphate
  modified_base 21: mod_base = OTHER; note = 2'-O-methyladenosine-3'-phosphate N-[tris(GalNAc-alkyl)-amidodecanoyl)]-4-hydroxyprolinol Hyp-(GalNAc-alkyl)3 (2S,4R)-1-[29-[[2-(acetylamino)-2-deoxy-beta-D-galactopyran osyl]oxy]-14,14-bis[[3-[[3-[[5-[[2-(acetylamino)-2-deoxy-be ta-D-galactopyranosyl]oxy]-1-oxopentyl]amino]propyl]amino]- 3-oxopropoxy]methyl]-1,12,19,25-tetraoxo-16-oxa-13,20,24-tr iazanonacos-1-yl]-4-hydroxy-2-hydroxymethylpyrrolidine
ccacttccctcttctagtcta

SEQ ID NO: 721 - RNA, 21 nt, synthetic construct
  source 1..21: mol_type = other RNA
  modified_base 1: mod_base = OTHER; note = 2'-O-methylcytidine-3'- phosphorothioate
  modified_base 2: mod_base = OTHER; note = 2'-O-methylcytidine-3'- phosphorothioate
  modified_base 3: mod_base = OTHER; note = 2'-O-methyladenosine-3'-phosphate
  modified_base 4: mod_base = OTHER; note = 2'-O-methylcytidine-3'-phosphate
  modified_base 5: mod_base = OTHER; note = 2'-O-methyluridine-3'-phosphate
  modified_base 6: mod_base = OTHER; note = 2'-O-hexadecyl-uridine-3'-phosphate
  modified_base 7: mod_base = OTHER; note = 2'-O-methylcytidine-3'-phosphate
  modified_base 8: mod_base = OTHER; note = 2'-O-methylcytidine-3'-phosphate
  modified_base 9: mod_base = OTHER; note = 2'-fluorocytidine-3'-phosphate
  modified_base 10: mod_base = OTHER; note = 2'-fluorouridine-3'-phosphate
  modified_base 11: mod_base = OTHER; note = 2'-fluorocytidine-3'-phosphate
  modified_base 12: mod_base = OTHER; note = 2'-O-methyluridine-3'-phosphate
  modified_base 13: mod_base = OTHER; note = 2'-O-methyluridine-3'-phosphate
  modified_base 14: mod_base = OTHER; note = 2'-O-methylcytidine-3'-phosphate
  modified_base 15: mod_base = OTHER; note = 2'-O-methyluridine-3'-phosphate
  modified_base 16: mod_base = OTHER; note = 2'-O-methyladenosine-3'-phosphate
  modified_base 17: mod_base = OTHER; note = 2'-O-methylguanosine-3'-phosphate
  modified_base 18: mod_base = OTHER; note = 2'-O-methyluridine-3'-phosphate
  modified_base 19: mod_base = OTHER; note = 2'-O-methylcytidine-3'-phosphate
  modified_base 20: mod_base = OTHER; note = 2'-O-methyluridine-3'-phosphate
  modified_base 21: mod_base = OTHER; note = 2'-O-methyladenosine-3'-phosphate N-[tris(GalNAc-alkyl)-amidodecanoyl)]-4-hydroxyprolinol Hyp-(GalNAc-alkyl)3 (2S,4R)-1-[29-[[2-(acetylamino)-2-deoxy-beta-D-galactopyran osyl]oxy]-14,14-bis[[3-[[3-[[5-[[2-(acetylamino)-2-deoxy-be ta-D-galactopyranosyl]oxy]-1-oxopentyl]amino]propyl]amino]- 3-oxopropoxy]methyl]-1,12,19,25-tetraoxo-16-oxa-13,20,24-tr iazanonacos-1-yl]-4-hydroxy-2-hydroxymethylpyrrolidine
ccacttccctcttctagtcta

SEQ ID NO: 722 - RNA, 21 nt, synthetic construct
  source 1..21: mol_type = other RNA
  modified_base 1: mod_base = OTHER; note = 2'-O-methylcytidine-3'- phosphorothioate
  modified_base 2: mod_base = OTHER; note = 2'-O-methyladenosine-3'- phosphorothioate
  modified_base 3: mod_base = OTHER; note = 2'-O-methylcytidine-3'-phosphate
  modified_base 4: mod_base = OTHER; note = 2'-O-methyluridine-3'-phosphate
  modified_base 5: mod_base = OTHER; note = 2'-O-methyluridine-3'-phosphate
  modified_base 6: mod_base = OTHER; note = 2'-O-hexadecyl-cytidine-3'-phosphate
  modified_base 7: mod_base = OTHER; note = 2'-fluorocytidine-3'-phosphate
  modified_base 8: mod_base = OTHER; note = 2'-O-methylcytidine-3'-phosphate
  modified_base 9: mod_base = OTHER; note = 2'-fluorouridine-3'-phosphate
  modified_base 10: mod_base = OTHER; note = 2'-fluorocytidine-3'-phosphate
  modified_base 11: mod_base = OTHER; note = 2'-fluorouridine-3'-phosphate
  modified_base 12: mod_base = OTHER; note = 2'-O-methyluridine-3'-phosphate
  modified_base 13: mod_base = OTHER; note = 2'-O-methylcytidine-3'-phosphate
  modified_base 14: mod_base = OTHER; note = 2'-O-methyluridine-3'-phosphate
  modified_base 15: mod_base = OTHER; note = 2'-O-methyladenosine-3'-phosphate
  modified_base 16: mod_base = OTHER; note = 2'-O-methylguanosine-3'-phosphate
  modified_base 17: mod_base = OTHER; note = 2'-O-methyluridine-3'-phosphate
  modified_base 18: mod_base = OTHER; note = 2'-O-methylcytidine-3'-phosphate
  modified_base 19: mod_base = OTHER; note = 2'-O-methyluridine-3'-phosphate
  modified_base 20: mod_base = OTHER; note = 2'-O-methylguanosine-3'-phosphate
  modified_base 21: mod_base = OTHER; note = 2'-O-methyladenosine-3'-phosphate N-[tris(GalNAc-alkyl)-amidodecanoyl)]-4-hydroxyprolinol Hyp-(GalNAc-alkyl)3 (2S,4R)-1-[29-[[2-(acetylamino)-2-deoxy-beta-D-galactopyran osyl]oxy]-14,14-bis[[3-[[3-[[5-[[2-(acetylamino)-2-deoxy-be ta-D-galactopyranosyl]oxy]-1-oxopentyl]amino]propyl]amino]- 3-oxopropoxy]methyl]-1,12,19,25-tetraoxo-16-oxa-13,20,24-tr iazanonacos-1-yl]-4-hydroxy-2-hydroxymethylpyrrolidine
cacttccctcttctagtctga

SEQ ID NO: 723 - RNA, 21 nt, synthetic construct
  source 1..21: mol_type = other RNA
  modified_base 1: mod_base = OTHER; note = 2'-O-methylcytidine-3'- phosphorothioate
  modified_base 2: mod_base = OTHER; note = 2'-O-methyladenosine-3'- phosphorothioate
  modified_base 3: mod_base = OTHER; note = 2'-O-methylcytidine-3'-phosphate
  modified_base 4: mod_base = OTHER; note = 2'-O-methyluridine-3'-phosphate
  modified_base 5: mod_base = OTHER; note = 2'-O-methyluridine-3'-phosphate
  modified_base 6: mod_base = OTHER; note = 2'-O-hexadecyl-cytidine-3'-phosphate
  modified_base 7: mod_base = OTHER; note = 2'-O-methylcytidine-3'-phosphate
  modified_base 8: mod_base = OTHER; note = 2'-O-methylcytidine-3'-phosphate
  modified_base 9: mod_base = OTHER; note = 2'-fluorouridine-3'-phosphate
  modified_base 10: mod_base = OTHER; note = 2'-fluorocytidine-3'-phosphate
  modified_base 11: mod_base = OTHER; note = 2'-fluorouridine-3'-phosphate
  modified_base 12: mod_base = OTHER; note = 2'-O-methyluridine-3'-phosphate
  modified_base 13: mod_base = OTHER; note = 2'-O-methylcytidine-3'-phosphate
  modified_base 14: mod_base = OTHER; note = 2'-O-methyluridine-3'-phosphate
  modified_base 15: mod_base = OTHER; note = 2'-O-methyladenosine-3'-phosphate
  modified_base 16: mod_base = OTHER; note = 2'-O-methylguanosine-3'-phosphate
  modified_base 17: mod_base = OTHER; note = 2'-O-methyluridine-3'-phosphate
  modified_base 18: mod_base = OTHER; note = 2'-O-methylcytidine-3'-phosphate
  modified_base 19: mod_base = OTHER; note = 2'-O-methyluridine-3'-phosphate
  modified_base 20: mod_base = OTHER; note = 2'-O-methylguanosine-3'-phosphate
  modified_base 21: mod_base = OTHER; note = 2'-O-methyladenosine-3'-phosphate N-[tris(GalNAc-alkyl)-amidodecanoyl)]-4-hydroxyprolinol Hyp-(GalNAc-alkyl)3 (2S,4R)-1-[29-[[2-(acetylamino)-2-deoxy-beta-D-galactopyran osyl]oxy]-14,14-bis[[3-[[3-[[5-[[2-(acetylamino)-2-deoxy-be ta-D-galactopyranosyl]oxy]-1-oxopentyl]amino]propyl]amino]- 3-oxopropoxy]methyl]-1,12,19,25-tetraoxo-16-oxa-13,20,24-tr iazanonacos-1-yl]-4-hydroxy-2-hydroxymethylpyrrolidine
cacttccctcttctagtctga

SEQ ID NO: 724 - RNA, 21 nt, synthetic construct
  source 1..21: mol_type = other RNA
  modified_base 1: mod_base = OTHER; note = 2'-O-methyladenosine-3'- phosphorothioate
  modified_base 2: mod_base = OTHER; note = 2'-O-methylcytidine-3'- phosphorothioate
  modified_base 3: mod_base = OTHER; note = 2'-O-methyluridine-3'-phosphate
  modified_base 4: mod_base = OTHER; note = 2'-O-methyluridine-3'-phosphate
  modified_base 5: mod_base = OTHER; note = 2'-O-methylcytidine-3'-phosphate
  modified_base 6: mod_base = OTHER; note = 2'-O-hexadecyl-cytidine-3'-phosphate
  modified_base 7: mod_base = OTHER; note = 2'-fluorocytidine-3'-phosphate
  modified_base 8: mod_base = OTHER; note = 2'-O-methyluridine-3'-phosphate
  modified_base 9: mod_base = OTHER; note = 2'-fluorocytidine-3'-phosphate
  modified_base 10: mod_base = OTHER; note = 2'-fluorouridine-3'-phosphate
  modified_base 11: mod_base = OTHER; note = 2'-fluorouridine-3'-phosphate
  modified_base 12: mod_base = OTHER; note = 2'-O-methylcytidine-3'-phosphate
  modified_base 13: mod_base = OTHER; note = 2'-O-methyluridine-3'-phosphate
  modified_base 14: mod_base = OTHER; note = 2'-O-methyladenosine-3'-phosphate
  modified_base 15: mod_base = OTHER; note = 2'-O-methylguanosine-3'-phosphate
  modified_base 16: mod_base = OTHER; note = 2'-O-methyluridine-3'-phosphate
  modified_base 17: mod_base = OTHER; note = 2'-O-methylcytidine-3'-phosphate
  modified_base 18: mod_base = OTHER; note = 2'-O-methyluridine-3'-phosphate
  modified_base 19: mod_base = OTHER; note = 2'-O-methylguanosine-3'-phosphate
  modified_base 20: mod_base = OTHER; note = 2'-O-methyladenosine-3'-phosphate
  modified_base 21: mod_base = OTHER; note = 2'-O-methyladenosine-3'-phosphate N-[tris(GalNAc-alkyl)-amidodecanoyl)]-4-hydroxyprolinol Hyp-(GalNAc-alkyl)3 (2S,4R)-1-[29-[[2-(acetylamino)-2-deoxy-beta-D-galactopyran osyl]oxy]-14,14-bis[[3-[[3-[[5-[[2-(acetylamino)-2-deoxy-be ta-D-galactopyranosyl]oxy]-1-oxopentyl]amino]propyl]amino]- 3-oxopropoxy]methyl]-1,12,19,25-tetraoxo-16-oxa-13,20,24-tr iazanonacos-1-yl]-4-hydroxy-2-hydroxymethylpyrrolidine
acttccctcttctagtctgaa

SEQ ID NO: 725 - RNA, 21 nt, synthetic construct
  source 1..21: mol_type = other RNA
  modified_base 1: mod_base = OTHER; note = 2'-O-methylcytidine-3'- phosphorothioate
  modified_base 2: mod_base = OTHER; note = 2'-O-methyluridine-3'-phosphorothioate
  modified_base 3: mod_base = OTHER; note = 2'-O-methyluridine-3'-phosphate
  modified_base 4: mod_base = OTHER; note = 2'-O-methylcytidine-3'-phosphate
  modified_base 5: mod_base = OTHER; note = 2'-O-methylcytidine-3'-phosphate
  modified_base 6: mod_base = OTHER; note = 2'-O-hexadecyl-cytidine-3'-phosphate
  modified_base 7: mod_base = OTHER; note = 2'-fluorouridine-3'-phosphate
  modified_base 8: mod_base = OTHER; note = 2'-O-methylcytidine-3'-phosphate
  modified_base 9: mod_base = OTHER; note = 2'-fluorouridine-3'-phosphate
  modified_base 10: mod_base = OTHER; note = 2'-fluorouridine-3'-phosphate
  modified_base 11: mod_base = OTHER; note = 2'-fluorocytidine-3'-phosphate
  modified_base 12: mod_base = OTHER; note = 2'-O-methyluridine-3'-phosphate
  modified_base 13: mod_base = OTHER; note = 2'-O-methyladenosine-3'-phosphate
  modified_base 14: mod_base = OTHER; note = 2'-O-methylguanosine-3'-phosphate
  modified_base 15: mod_base = OTHER; note = 2'-O-methyluridine-3'-phosphate
  modified_base 16: mod_base = OTHER; note = 2'-O-methylcytidine-3'-phosphate
  modified_base 17: mod_base = OTHER; note = 2'-O-methyluridine-3'-phosphate
  modified_base 18: mod_base = OTHER; note = 2'-O-methylguanosine-3'-phosphate
  modified_base 19: mod_base = OTHER; note = 2'-O-methyladenosine-3'-phosphate
  modified_base 20: mod_base = OTHER; note = 2'-O-methylguanosine-3'-phosphate
  modified_base 21: mod_base = OTHER; note = 2'-O-methyladenosine-3'-phosphate N-[tris(GalNAc-alkyl)-amidodecanoyl)]-4-hydroxyprolinol Hyp-(GalNAc-alkyl)3 (2S,4R)-1-[29-[[2-(acetylamino)-2-deoxy-beta-D-galactopyran osyl]oxy]-14,14-bis[[3-[[3-[[5-[[2-(acetylamino)-2-deoxy-be ta-D-galactopyranosyl]oxy]-1-oxopentyl]amino]propyl]amino]- 3-oxopropoxy]methyl]-1,12,19,25-tetraoxo-16-oxa-13,20,24-tr iazanonacos-1-yl]-4-hydroxy-2-hydroxymethylpyrrolidine
cttccctcttctagtctgaga

SEQ ID NO: 726 - RNA, 21 nt, synthetic construct
  source 1..21: mol_type = other RNA
  modified_base 1: mod_base = OTHER; note = 2'-O-methylcytidine-3'- phosphorothioate
  modified_base 2: mod_base = OTHER; note = 2'-O-methyluridine-3'-phosphorothioate
  modified_base 3: mod_base = OTHER; note = 2'-O-methyluridine-3'-phosphate
  modified_base 4: mod_base = OTHER; note = 2'-O-methylcytidine-3'-phosphate
  modified_base 5: mod_base = OTHER; note = 2'-O-methylcytidine-3'-phosphate
  modified_base 6: mod_base = OTHER; note = 2'-O-hexadecyl-cytidine-3'-phosphate
  modified_base 7: mod_base = OTHER; note = 2'-O-methyluridine-3'-phosphate
  modified_base 8: mod_base = OTHER; note = 2'-O-methylcytidine-3'-phosphate
  modified_base 9: mod_base = OTHER; note = 2'-fluorouridine-3'-phosphate
  modified_base 10: mod_base = OTHER; note = 2'-fluorouridine-3'-phosphate
  modified_base 11: mod_base = OTHER; note = 2'-fluorocytidine-3'-phosphate
  modified_base 12: mod_base = OTHER; note = 2'-O-methyluridine-3'-phosphate
  modified_base 13: mod_base = OTHER; note = 2'-O-methyladenosine-3'-phosphate
  modified_base 14: mod_base = OTHER; note = 2'-O-methylguanosine-3'-phosphate
  modified_base 15: mod_base = OTHER; note = 2'-O-methyluridine-3'-phosphate
  modified_base 16: mod_base = OTHER; note = 2'-O-methylcytidine-3'-phosphate
  modified_base 17: mod_base = OTHER; note = 2'-O-methyluridine-3'-phosphate
  modified_base 18: mod_base = OTHER; note = 2'-O-methylguanosine-3'-phosphate
  modified_base 19: mod_base = OTHER; note = 2'-O-methyladenosine-3'-phosphate
  modified_base 20: mod_base = OTHER; note = 2'-O-methylguanosine-3'-phosphate
  modified_base 21: mod_base = OTHER; note = 2'-O-methyladenosine-3'-phosphate N-[tris(GalNAc-alkyl)-amidodecanoyl)]-4-hydroxyprolinol Hyp-(GalNAc-alkyl)3 (2S,4R)-1-[29-[[2-(acetylamino)-2-deoxy-beta-D-galactopyran osyl]oxy]-14,14-bis[[3-[[3-[[5-[[2-(acetylamino)-2-deoxy-be ta-D-galactopyranosyl]oxy]-1-oxopentyl]amino]propyl]amino]- 3-oxopropoxy]methyl]-1,12,19,25-tetraoxo-16-oxa-13,20,24-tr iazanonacos-1-yl]-4-hydroxy-2-hydroxymethylpyrrolidine
cttccctcttctagtctgaga

SEQ ID NO: 727 - RNA, 21 nt, synthetic construct
  source 1..21: mol_type = other RNA
  modified_base 1: mod_base = OTHER; note = 2'-O-methyluridine-3'-phosphorothioate
  modified_base 2: mod_base = OTHER; note = 2'-O-methylcytidine-3'- phosphorothioate
  modified_base 3: mod_base = OTHER; note = 2'-O-methylcytidine-3'-phosphate
  modified_base 4: mod_base = OTHER; note = 2'-O-methylcytidine-3'-phosphate
  modified_base 5: mod_base = OTHER; note = 2'-O-methyluridine-3'-phosphate
  modified_base 6: mod_base = OTHER; note = 2'-O-hexadecyl-cytidine-3'-phosphate
  modified_base 7: mod_base = OTHER; note = 2'-fluorouridine-3'-phosphate
  modified_base 8: mod_base = OTHER; note = 2'-O-methyluridine-3'-phosphate
  modified_base 9: mod_base = OTHER; note = 2'-fluorocytidine-3'-phosphate
  modified_base 10: mod_base = OTHER; note = 2'-fluorouridine-3'-phosphate
  modified_base 11: mod_base = OTHER; note = 2'-fluoroadenosine-3'-phosphate
  modified_base 12: mod_base = OTHER; note = 2'-O-methylguanosine-3'-phosphate
  modified_base 13: mod_base = OTHER; note = 2'-O-methyluridine-3'-phosphate
  modified_base 14: mod_base = OTHER; note = 2'-O-methylcytidine-3'-phosphate
  modified_base 15: mod_base = OTHER; note = 2'-O-methyluridine-3'-phosphate
  modified_base 16: mod_base = OTHER; note = 2'-O-methylguanosine-3'-phosphate
  modified_base 17: mod_base = OTHER; note = 2'-O-methyladenosine-3'-phosphate
  modified_base 18: mod_base = OTHER; note = 2'-O-methylguanosine-3'-phosphate
  modified_base 19: mod_base = OTHER; note = 2'-O-methyladenosine-3'-phosphate
  modified_base 20: mod_base = OTHER; note = 2'-O-methylguanosine-3'-phosphate
  modified_base 21: mod_base = OTHER; note = 2'-O-methyladenosine-3'-phosphate N-[tris(GalNAc-alkyl)-amidodecanoyl)]-4-hydroxyprolinol Hyp-(GalNAc-alkyl)3 (2S,4R)-1-[29-[[2-(acetylamino)-2-deoxy-beta-D-galactopyran osyl]oxy]-14,14-bis[[3-[[3-[[5-[[2-(acetylamino)-2-deoxy-be ta-D-galactopyranosyl]oxy]-1-oxopentyl]amino]propyl]amino]- 3-oxopropoxy]methyl]-1,12,19,25-tetraoxo-16-oxa-13,20,24-tr iazanonacos-1-yl]-4-hydroxy-2-hydroxymethylpyrrolidine
tccctcttctagtctgagaga

SEQ ID NO: 728 - RNA, 21 nt, synthetic construct
  source 1..21: mol_type = other RNA
  modified_base 1: mod_base = OTHER; note = 2'-O-methylcytidine-3'- phosphorothioate
  modified_base 2: mod_base = OTHER; note = 2'-O-methylcytidine-3'- phosphorothioate
  modified_base 3: mod_base = OTHER; note = 2'-O-methyluridine-3'-phosphate
  modified_base 4: mod_base = OTHER; note = 2'-O-methylcytidine-3'-phosphate
  modified_base 5: mod_base = OTHER; note = 2'-O-methyluridine-3'-phosphate
  modified_base 6: mod_base = OTHER; note = 2'-O-hexadecyl-uridine-3'-phosphate
  modified_base 7: mod_base = OTHER; note = 2'-fluorocytidine-3'-phosphate
  modified_base 8: mod_base = OTHER; note = 2'-O-methyluridine-3'-phosphate
  modified_base 9: mod_base = OTHER; note = 2'-fluoroadenosine-3'-phosphate
  modified_base 10: mod_base = OTHER; note = 2'-fluoroguanosine-3'-phosphate
  modified_base 11: mod_base = OTHER; note = 2'-fluorouridine-3'-phosphate
  modified_base 12: mod_base = OTHER; note = 2'-O-methylcytidine-3'-phosphate
  modified_base 13: mod_base = OTHER; note = 2'-O-methyluridine-3'-phosphate
  modified_base 14: mod_base = OTHER; note = 2'-O-methylguanosine-3'-phosphate
  modified_base 15: mod_base = OTHER; note = 2'-O-methyladenosine-3'-phosphate
  modified_base 16: mod_base = OTHER; note = 2'-O-methylguanosine-3'-phosphate
  modified_base 17: mod_base = OTHER; note = 2'-O-methyladenosine-3'-phosphate
  modified_base 18: mod_base = OTHER; note = 2'-O-methylguanosine-3'-phosphate
  modified_base 19: mod_base = OTHER; note = 2'-O-methylguanosine-3'-phosphate
  modified_base 20: mod_base = OTHER; note = 2'-O-methylguanosine-3'-phosphate
  modified_base 21: mod_base = OTHER; note = 2'-O-methyladenosine-3'-phosphate N-[tris(GalNAc-alkyl)-amidodecanoyl)]-4-hydroxyprolinol Hyp-(GalNAc-alkyl)3 (2S,4R)-1-[29-[[2-(acetylamino)-2-deoxy-beta-D-galactopyran osyl]oxy]-14,14-bis[[3-[[3-[[5-[[2-(acetylamino)-2-deoxy-be ta-D-galactopyranosyl]oxy]-1-oxopentyl]amino]propyl]amino]- 3-oxopropoxy]methyl]-1,12,19,25-tetraoxo-16-oxa-13,20,24-tr iazanonacos-1-yl]-4-hydroxy-2-hydroxymethylpyrrolidine
cctcttctagtctgagaggga

SEQ ID NO: 729 - RNA, 21 nt, synthetic construct
  source 1..21: mol_type = other RNA
  modified_base 1: mod_base = OTHER; note = 2'-O-methylcytidine-3'- phosphorothioate
  modified_base 2: mod_base = OTHER; note = 2'-O-methylcytidine-3'- phosphorothioate
  modified_base 3: mod_base = OTHER; note = 2'-O-methyluridine-3'-phosphate
  modified_base 4: mod_base = OTHER; note = 2'-O-methylcytidine-3'-phosphate
  modified_base 5: mod_base = OTHER; note = 2'-O-methyluridine-3'-phosphate
  modified_base 6: mod_base = OTHER; note = 2'-O-hexadecyl-uridine-3'-phosphate
  modified_base 7: mod_base = OTHER; note = 2'-O-methylcytidine-3'-phosphate
  modified_base 8: mod_base = OTHER; note = 2'-O-methyluridine-3'-phosphate
  modified_base 9: mod_base = OTHER; note = 2'-fluoroadenosine-3'-phosphate
  modified_base 10: mod_base = OTHER; note = 2'-fluoroguanosine-3'-phosphate
  modified_base 11: mod_base = OTHER; note = 2'-fluorouridine-3'-phosphate
  modified_base 12: mod_base = OTHER; note = 2'-O-methylcytidine-3'-phosphate
  modified_base 13: mod_base = OTHER; note = 2'-O-methyluridine-3'-phosphate
  modified_base 14: mod_base = OTHER; note = 2'-O-methylguanosine-3'-phosphate
  modified_base 15: mod_base = OTHER; note = 2'-O-methyladenosine-3'-phosphate
  modified_base 16: mod_base = OTHER; note = 2'-O-methylguanosine-3'-phosphate
  modified_base 17: mod_base = OTHER; note = 2'-O-methyladenosine-3'-phosphate
  modified_base 18: mod_base = OTHER; note = 2'-O-methylguanosine-3'-phosphate
  modified_base 19: mod_base = OTHER; note = 2'-O-methylguanosine-3'-phosphate
  modified_base 20: mod_base = OTHER; note = 2'-O-methylguanosine-3'-phosphate
  modified_base 21: mod_base = OTHER; note = 2'-O-methyladenosine-3'-phosphate N-[tris(GalNAc-alkyl)-amidodecanoyl)]-4-hydroxyprolinol Hyp-(GalNAc-alkyl)3 (2S,4R)-1-[29-[[2-(acetylamino)-2-deoxy-beta-D-galactopyran osyl]oxy]-14,14-bis[[3-[[3-[[5-[[2-(acetylamino)-2-deoxy-be ta-D-galactopyranosyl]oxy]-1-oxopentyl]amino]propyl]amino]- 3-oxopropoxy]methyl]-1,12,19,25-tetraoxo-16-oxa-13,20,24-tr iazanonacos-1-yl]-4-hydroxy-2-hydroxymethylpyrrolidine
cctcttctagtctgagaggga

SEQ ID NO: 730 - RNA, 21 nt, synthetic construct
  source 1..21: mol_type = other RNA
  modified_base 1: mod_base = OTHER; note = 2'-O-methyluridine-3'-phosphorothioate
  modified_base 2: mod_base = OTHER; note = 2'-O-methylcytidine-3'- phosphorothioate
  modified_base 3: mod_base = OTHER; note = 2'-O-methyluridine-3'-phosphate
  modified_base 4: mod_base = OTHER; note = 2'-O-methyluridine-3'-phosphate
  modified_base 5: mod_base = OTHER; note = 2'-O-methylcytidine-3'-phosphate
  modified_base 6: mod_base = OTHER; note = 2'-O-hexadecyl-uridine-3'-phosphate
  modified_base 7: mod_base = OTHER; note = 2'-fluoroadenosine-3'-phosphate
  modified_base 8: mod_base = OTHER; note = 2'-O-methylguanosine-3'-phosphate
  modified_base 9: mod_base = OTHER; note = 2'-fluorouridine-3'-phosphate
  modified_base 10: mod_base = OTHER; note = 2'-fluorocytidine-3'-phosphate
  modified_base 11: mod_base = OTHER; note = 2'-fluorouridine-3'-phosphate
  modified_base 12: mod_base = OTHER; note = 2'-O-methylguanosine-3'-phosphate
  modified_base 13: mod_base = OTHER; note = 2'-O-methyladenosine-3'-phosphate
  modified_base 14: mod_base = OTHER; note = 2'-O-methylguanosine-3'-phosphate
  modified_base 15: mod_base = OTHER; note = 2'-O-methyladenosine-3'-phosphate
  modified_base 16: mod_base = OTHER; note = 2'-O-methylguanosine-3'-phosphate
  modified_base 17: mod_base = OTHER; note = 2'-O-methylguanosine-3'-phosphate
  modified_base 18: mod_base = OTHER; note = 2'-O-methylguanosine-3'-phosphate
  modified_base 19: mod_base = OTHER; note = 2'-O-methyladenosine-3'-phosphate
  modified_base 20: mod_base = OTHER; note = 2'-O-methyladenosine-3'-phosphate
  modified_base 21: mod_base = OTHER; note = 2'-O-methyladenosine-3'-phosphate N-[tris(GalNAc-alkyl)-amidodecanoyl)]-4-hydroxyprolinol Hyp-(GalNAc-alkyl)3 (2S,4R)-1-[29-[[2-(acetylamino)-2-deoxy-beta-D-galactopyran osyl]oxy]-14,14-bis[[3-[[3-[[5-[[2-(acetylamino)-2-deoxy-be ta-D-galactopyranosyl]oxy]-1-oxopentyl]amino]propyl]amino]- 3-oxopropoxy]methyl]-1,12,19,25-tetraoxo-16-oxa-13,20,24-tr iazanonacos-1-yl]-4-hydroxy-2-hydroxymethylpyrrolidine
tcttctagtctgagagggaaa

SEQ ID NO: 731 - RNA, 21 nt, synthetic construct
  source 1..21: mol_type = other RNA
  modified_base 1: mod_base = OTHER; note = 2'-O-methylcytidine-3'- phosphorothioate
  modified_base 2: mod_base = OTHER; note = 2'-O-methyluridine-3'-phosphorothioate
  modified_base 3: mod_base = OTHER; note = 2'-O-methyluridine-3'-phosphate
  modified_base 4: mod_base = OTHER; note = 2'-O-methylcytidine-3'-phosphate
  modified_base 5: mod_base = OTHER; note = 2'-O-methyluridine-3'-phosphate
  modified_base 6: mod_base = OTHER; note = 2'-O-hexadecyl-adenosine-3'-phosphate
  modified_base 7: mod_base = OTHER; note = 2'-fluoroguanosine-3'-phosphate
  modified_base 8: mod_base = OTHER; note = 2'-O-methyluridine-3'-phosphate
  modified_base 9: mod_base = OTHER; note = 2'-fluorocytidine-3'-phosphate
  modified_base 10: mod_base = OTHER; note = 2'-fluorouridine-3'-phosphate
  modified_base 11: mod_base = OTHER; note = 2'-fluoroguanosine-3'-phosphate
  modified_base 12: mod_base = OTHER; note = 2'-O-methyladenosine-3'-phosphate
  modified_base 13: mod_base = OTHER; note = 2'-O-methylguanosine-3'-phosphate
  modified_base 14: mod_base = OTHER; note = 2'-O-methyladenosine-3'-phosphate
  modified_base 15: mod_base = OTHER; note = 2'-O-methylguanosine-3'-phosphate
  modified_base 16: mod_base = OTHER; note = 2'-O-methylguanosine-3'-phosphate
  modified_base 17: mod_base = OTHER; note = 2'-O-methylguanosine-3'-phosphate
  modified_base 18: mod_base = OTHER; note = 2'-O-methyladenosine-3'-phosphate
  modified_base 19: mod_base = OTHER; note = 2'-O-methyladenosine-3'-phosphate
  modified_base 20: mod_base = OTHER; note = 2'-O-methylguanosine-3'-phosphate
  modified_base 21: mod_base = OTHER; note = 2'-O-methyladenosine-3'-phosphate N-[tris(GalNAc-alkyl)-amidodecanoyl)]-4-hydroxyprolinol Hyp-(GalNAc-alkyl)3 (2S,4R)-1-[29-[[2-(acetylamino)-2-deoxy-beta-D-galactopyran osyl]oxy]-14,14-bis[[3-[[3-[[5-[[2-(acetylamino)-2-deoxy-be ta-D-galactopyranosyl]oxy]-1-oxopentyl]amino]propyl]amino]- 3-oxopropoxy]methyl]-1,12,19,25-tetraoxo-16-oxa-13,20,24-tr iazanonacos-1-yl]-4-hydroxy-2-hydroxymethylpyrrolidine
cttctagtctgagagggaaga

SEQ ID NO: 732 - RNA, 21 nt, synthetic construct
  source 1..21: mol_type = other RNA
  modified_base 1: mod_base = OTHER; note = 2'-O-methylcytidine-3'- phosphorothioate
  modified_base 2: mod_base = OTHER; note = 2'-O-methyluridine-3'-phosphorothioate
  modified_base 3: mod_base = OTHER; note = 2'-O-methyluridine-3'-phosphate
  modified_base 4: mod_base = OTHER; note = 2'-O-methylcytidine-3'-phosphate
  modified_base 5: mod_base = OTHER; note = 2'-O-methyluridine-3'-phosphate
  modified_base 6: mod_base = OTHER; note = 2'-O-hexadecyl-adenosine-3'-phosphate
  modified_base 7: mod_base = OTHER; note = 2'-O-methylguanosine-3'-phosphate
  modified_base 8: mod_base = OTHER; note = 2'-O-methyluridine-3'-phosphate
  modified_base 9: mod_base = OTHER; note = 2'-fluorocytidine-3'-phosphate
  modified_base 10: mod_base = OTHER; note = 2'-fluorouridine-3'-phosphate
  modified_base 11: mod_base = OTHER; note = 2'-fluoroguanosine-3'-phosphate
  modified_base 12: mod_base = OTHER; note = 2'-O-methyladenosine-3'-phosphate
  modified_base 13: mod_base = OTHER; note = 2'-O-methylguanosine-3'-phosphate
  modified_base 14: mod_base = OTHER; note = 2'-O-methyladenosine-3'-phosphate
  modified_base 15: mod_base = OTHER; note = 2'-O-methylguanosine-3'-phosphate
  modified_base 16: mod_base = OTHER; note = 2'-O-methylguanosine-3'-phosphate
  modified_base 17: mod_base = OTHER; note = 2'-O-methylguanosine-3'-phosphate
  modified_base 18: mod_base = OTHER; note = 2'-O-methyladenosine-3'-phosphate
  modified_base 19: mod_base = OTHER; note = 2'-O-methyladenosine-3'-phosphate
  modified_base 20: mod_base = OTHER; note = 2'-O-methylguanosine-3'-phosphate
  modified_base 21: mod_base = OTHER; note = 2'-O-methyladenosine-3'-phosphate N-[tris(GalNAc-alkyl)-amidodecanoyl)]-4-hydroxyprolinol Hyp-(GalNAc-alkyl)3 (2S,4R)-1-[29-[[2-(acetylamino)-2-deoxy-beta-D-galactopyran osyl]oxy]-14,14-bis[[3-[[3-[[5-[[2-(acetylamino)-2-deoxy-be ta-D-galactopyranosyl]oxy]-1-oxopentyl]amino]propyl]amino]- 3-oxopropoxy]methyl]-1,12,19,25-tetraoxo-16-oxa-13,20,24-tr iazanonacos-1-yl]-4-hydroxy-2-hydroxymethylpyrrolidine
cttctagtctgagagggaaga

SEQ ID NO: 733 - RNA, 21 nt, synthetic construct
  source 1..21: mol_type = other RNA
  modified_base 1: mod_base = OTHER; note = 2'-O-methyluridine-3'-phosphorothioate
  modified_base 2: mod_base = OTHER; note = 2'-O-methylcytidine-3'- phosphorothioate
  modified_base 3: mod_base = OTHER; note = 2'-O-methyluridine-3'-phosphate
  modified_base 4: mod_base = OTHER; note = 2'-O-methyladenosine-3'-phosphate
  modified_base 5: mod_base = OTHER; note = 2'-O-methylguanosine-3'-phosphate
  modified_base 6: mod_base = OTHER; note = 2'-O-hexadecyl-uridine-3'-phosphate
  modified_base 7: mod_base = OTHER; note = 2'-fluorocytidine-3'-phosphate
  modified_base 8: mod_base = OTHER; note = 2'-O-methyluridine-3'-phosphate
  modified_base 9: mod_base = OTHER; note = 2'-fluoroguanosine-3'-phosphate
  modified_base 10: mod_base = OTHER; note = 2'-fluoroadenosine-3'-phosphate
  modified_base 11: mod_base = OTHER; note = 2'-fluoroguanosine-3'-phosphate
  modified_base 12: mod_base = OTHER; note = 2'-O-methyladenosine-3'-phosphate
  modified_base 13: mod_base = OTHER; note = 2'-O-methylguanosine-3'-phosphate
  modified_base 14: mod_base = OTHER; note = 2'-O-methylguanosine-3'-phosphate
  modified_base 15: mod_base = OTHER; note = 2'-O-methylguanosine-3'-phosphate
  modified_base 16: mod_base = OTHER; note = 2'-O-methyladenosine-3'-phosphate
  modified_base 17: mod_base = OTHER; note = 2'-O-methyladenosine-3'-phosphate
  modified_base 18: mod_base = OTHER; note = 2'-O-methylguanosine-3'-phosphate
  modified_base 19: mod_base = OTHER; note = 2'-O-methyladenosine-3'-phosphate
  modified_base 20: mod_base = OTHER; note = 2'-O-methylguanosine-3'-phosphate
  modified_base 21: mod_base = OTHER; note = 2'-O-methyladenosine-3'-phosphate N-[tris(GalNAc-alkyl)-amidodecanoyl)]-4-hydroxyprolinol Hyp-(GalNAc-alkyl)3 (2S,4R)-1-[29-[[2-(acetylamino)-2-deoxy-beta-D-galactopyran osyl]oxy]-14,14-bis[[3-[[3-[[5-[[2-(acetylamino)-2-deoxy-be ta-D-galactopyranosyl]oxy]-1-oxopentyl]amino]propyl]amino]- 3-oxopropoxy]methyl]-1,12,19,25-tetraoxo-16-oxa-13,20,24-tr iazanonacos-1-yl]-4-hydroxy-2-hydroxymethylpyrrolidine
tctagtctgagagggaagaga

SEQ ID NO: 734 - RNA, 21 nt, synthetic construct
  source 1..21: mol_type = other RNA
  modified_base 1: mod_base = OTHER; note = 2'-O-methyluridine-3'-phosphorothioate
  modified_base 2: mod_base = OTHER; note = 2'-O-methylcytidine-3'- phosphorothioate
  modified_base 3: mod_base = OTHER; note = 2'-O-methyluridine-3'-phosphate
  modified_base 4: mod_base = OTHER; note = 2'-O-methyladenosine-3'-phosphate
  modified_base 5: mod_base = OTHER; note = 2'-O-methylguanosine-3'-phosphate
  modified_base 6: mod_base = OTHER; note = 2'-O-hexadecyl-uridine-3'-phosphate
  modified_base 7: mod_base = OTHER; note = 2'-O-methylcytidine-3'-phosphate
  modified_base 8: mod_base = OTHER; note = 2'-O-methyluridine-3'-phosphate
  modified_base 9: mod_base = OTHER; note = 2'-fluoroguanosine-3'-phosphate
  modified_base 10: mod_base = OTHER; note = 2'-fluoroadenosine-3'-phosphate
  modified_base 11: mod_base = OTHER; note = 2'-fluoroguanosine-3'-phosphate
  modified_base 12: mod_base = OTHER; note = 2'-O-methyladenosine-3'-phosphate
  modified_base 13: mod_base = OTHER; note = 2'-O-methylguanosine-3'-phosphate
  modified_base 14: mod_base = OTHER; note = 2'-O-methylguanosine-3'-phosphate
  modified_base 15: mod_base = OTHER; note = 2'-O-methylguanosine-3'-phosphate
  modified_base 16: mod_base = OTHER; note = 2'-O-methyladenosine-3'-phosphate
  modified_base 17: mod_base = OTHER; note = 2'-O-methyladenosine-3'-phosphate
  modified_base 18: mod_base = OTHER; note = 2'-O-methylguanosine-3'-phosphate
  modified_base 19: mod_base = OTHER; note = 2'-O-methyladenosine-3'-phosphate
  modified_base 20: mod_base = OTHER; note = 2'-O-methylguanosine-3'-phosphate
  modified_base 21: mod_base = OTHER; note = 2'-O-methyladenosine-3'-phosphate N-[tris(GalNAc-alkyl)-amidodecanoyl)]-4-hydroxyprolinol Hyp-(GalNAc-alkyl)3 (2S,4R)-1-[29-[[2-(acetylamino)-2-deoxy-beta-D-galactopyran osyl]oxy]-14,14-bis[[3-[[3-[[5-[[2-(acetylamino)-2-deoxy-be ta-D-galactopyranosyl]oxy]-1-oxopentyl]amino]propyl]amino]- 3-oxopropoxy]methyl]-1,12,19,25-tetraoxo-16-oxa-13,20,24-tr iazanonacos-1-yl]-4-hydroxy-2-hydroxymethylpyrrolidine
tctagtctgagagggaagaga

SEQ ID NO: 735 - RNA, 21 nt, synthetic construct
  source 1..21: mol_type = other RNA
  modified_base 1: mod_base = OTHER; note = 2'-O-methylcytidine-3'- phosphorothioate
  modified_base 2: mod_base = OTHER; note = 2'-O-methyluridine-3'-phosphorothioate
  modified_base 3: mod_base = OTHER; note = 2'-O-methyladenosine-3'-phosphate
  modified_base 4: mod_base = OTHER; note = 2'-O-methylguanosine-3'-phosphate
  modified_base 5: mod_base = OTHER; note = 2'-O-methyluridine-3'-phosphate
  modified_base 6: mod_base = OTHER; note = 2'-O-hexadecyl-cytidine-3'-phosphate
  modified_base 7: mod_base = OTHER; note = 2'-fluorouridine-3'-phosphate
  modified_base 8: mod_base = OTHER; note = 2'-O-methylguanosine-3'-phosphate
  modified_base 9: mod_base = OTHER; note = 2'-fluoroadenosine-3'-phosphate
  modified_base 10: mod_base = OTHER; note = 2'-fluoroguanosine-3'-phosphate
  modified_base 11: mod_base = OTHER; note = 2'-fluoroadenosine-3'-phosphate
  modified_base 12: mod_base = OTHER; note = 2'-O-methylguanosine-3'-phosphate
  modified_base 13: mod_base = OTHER; note = 2'-O-methylguanosine-3'-phosphate
  modified_base 14: mod_base = OTHER; note = 2'-O-methylguanosine-3'-phosphate
  modified_base 15: mod_base = OTHER; note = 2'-O-methyladenosine-3'-phosphate
  modified_base 16: mod_base = OTHER; note = 2'-O-methyladenosine-3'-phosphate
  modified_base 17: mod_base = OTHER; note = 2'-O-methylguanosine-3'-phosphate
  modified_base 18: mod_base = OTHER; note = 2'-O-methyladenosine-3'-phosphate
  modified_base 19: mod_base = OTHER; note = 2'-O-methylguanosine-3'-phosphate
  modified_base 20: mod_base = OTHER; note = 2'-O-methylguanosine-3'-phosphate
  modified_base 21: mod_base = OTHER; note = 2'-O-methyladenosine-3'-phosphate N-[tris(GalNAc-alkyl)-amidodecanoyl)]-4-hydroxyprolinol Hyp-(GalNAc-alkyl)3 (2S,4R)-1-[29-[[2-(acetylamino)-2-deoxy-beta-D-galactopyran osyl]oxy]-14,14-bis[[3-[[3-[[5-[[2-(acetylamino)-2-deoxy-be ta-D-galactopyranosyl]oxy]-1-oxopentyl]amino]propyl]amino]- 3-oxopropoxy]methyl]-1,12,19,25-tetraoxo-16-oxa-13,20,24-tr iazanonacos-1-yl]-4-hydroxy-2-hydroxymethylpyrrolidine
ctagtctgagagggaagagga

SEQ ID NO: 736 - RNA, 21 nt, synthetic construct
  source 1..21: mol_type = other RNA
  modified_base 1: mod_base = OTHER; note = 2'-O-methylcytidine-3'- phosphorothioate
  modified_base 2: mod_base = OTHER; note = 2'-O-methyluridine-3'-phosphorothioate
  modified_base 3: mod_base = OTHER; note = 2'-O-methyladenosine-3'-phosphate
  modified_base 4: mod_base = OTHER; note = 2'-O-methylguanosine-3'-phosphate
  modified_base 5: mod_base = OTHER; note = 2'-O-methyluridine-3'-phosphate
  modified_base 6: mod_base = OTHER; note = 2'-O-hexadecyl-cytidine-3'-phosphate
  modified_base 7: mod_base = OTHER; note = 2'-O-methyluridine-3'-phosphate
  modified_base 8: mod_base = OTHER; note = 2'-O-methylguanosine-3'-phosphate
  modified_base 9: mod_base = OTHER; note = 2'-fluoroadenosine-3'-phosphate
  modified_base 10: mod_base = OTHER; note = 2'-fluoroguanosine-3'-phosphate
  modified_base 11: mod_base = OTHER; note = 2'-fluoroadenosine-3'-phosphate
  modified_base 12: mod_base = OTHER; note = 2'-O-methylguanosine-3'-phosphate
  modified_base 13: mod_base = OTHER; note = 2'-O-methylguanosine-3'-phosphate
  modified_base 14: mod_base = OTHER; note = 2'-O-methylguanosine-3'-phosphate
  modified_base 15: mod_base = OTHER; note = 2'-O-methyladenosine-3'-phosphate
  modified_base 16: mod_base = OTHER; note = 2'-O-methyladenosine-3'-phosphate
  modified_base 17: mod_base = OTHER; note = 2'-O-methylguanosine-3'-phosphate
  modified_base 18: mod_base = OTHER; note = 2'-O-methyladenosine-3'-phosphate
  modified_base 19: mod_base = OTHER; note = 2'-O-methylguanosine-3'-phosphate
  modified_base 20: mod_base = OTHER; note = 2'-O-methylguanosine-3'-phosphate
  modified_base 21: mod_base = OTHER; note = 2'-O-methyladenosine-3'-phosphate N-[tris(GalNAc-alkyl)-amidodecanoyl)]-4-hydroxyprolinol Hyp-(GalNAc-alkyl)3 (2S,4R)-1-[29-[[2-(acetylamino)-2-deoxy-beta-D-galactopyran osyl]oxy]-14,14-bis[[3-[[3-[[5-[[2-(acetylamino)-2-deoxy-be ta-D-galactopyranosyl]oxy]-1-oxopentyl]amino]propyl]amino]- 3-oxopropoxy]methyl]-1,12,19,25-tetraoxo-16-oxa-13,20,24-tr iazanonacos-1-yl]-4-hydroxy-2-hydroxymethylpyrrolidine
ctagtctgagagggaagagga

SEQ ID NO: 737 - RNA, 21 nt, synthetic construct
  source 1..21: mol_type = other RNA
  modified_base 1: mod_base = OTHER; note = 2'-O-methyluridine-3'-phosphorothioate
  modified_base 2: mod_base = OTHER; note = 2'-O-methyladenosine-3'- phosphorothioate
  modified_base 3: mod_base = OTHER; note = 2'-O-methylguanosine-3'-phosphate
  modified_base 4: mod_base = OTHER; note = 2'-O-methyluridine-3'-phosphate
  modified_base 5: mod_base = OTHER; note = 2'-O-methylcytidine-3'-phosphate
  modified_base 6: mod_base = OTHER; note = 2'-O-hexadecyl-uridine-3'-phosphate
  modified_base 7: mod_base = OTHER; note = 2'-fluoroguanosine-3'-phosphate
  modified_base 8: mod_base = OTHER; note = 2'-O-methyladenosine-3'-phosphate
  modified_base 9: mod_base = OTHER; note = 2'-fluoroguanosine-3'-phosphate
  modified_base 10: mod_base = OTHER; note = 2'-fluoroadenosine-3'-phosphate
  modified_base 11: mod_base = OTHER; note = 2'-fluoroguanosine-3'-phosphate
  modified_base 12: mod_base = OTHER; note = 2'-O-methylguanosine-3'-phosphate
  modified_base 13: mod_base = OTHER; note = 2'-O-methylguanosine-3'-phosphate
  modified_base 14: mod_base = OTHER; note = 2'-O-methyladenosine-3'-phosphate
  modified_base 15: mod_base = OTHER; note = 2'-O-methyladenosine-3'-phosphate
  modified_base 16: mod_base = OTHER; note = 2'-O-methylguanosine-3'-phosphate
  modified_base 17: mod_base = OTHER; note = 2'-O-methyladenosine-3'-phosphate
  modified_base 18: mod_base = OTHER; note = 2'-O-methylguanosine-3'-phosphate
  modified_base 19: mod_base = OTHER; note = 2'-O-methylguanosine-3'-phosphate
  modified_base 20: mod_base = OTHER; note = 2'-O-methylguanosine-3'-phosphate
  modified_base 21: mod_base = OTHER; note = 2'-O-methyladenosine-3'-phosphate N-[tris(GalNAc-alkyl)-amidodecanoyl)]-4-hydroxyprolinol Hyp-(GalNAc-alkyl)3 (2S,4R)-1-[29-[[2-(acetylamino)-2-deoxy-beta-D-galactopyran osyl]oxy]-14,14-bis[[3-[[3-[[5-[[2-(acetylamino)-2-deoxy-be ta-D-galactopyranosyl]oxy]-1-oxopentyl]amino]propyl]amino]- 3-oxopropoxy]methyl]-1,12,19,25-tetraoxo-16-oxa-13,20,24-tr iazanonacos-1-yl]-4-hydroxy-2-hydroxymethylpyrrolidine
tagtctgagagggaagaggga

SEQ ID NO: 738 - RNA, 21 nt, synthetic construct
  source 1..21: mol_type = other RNA
  modified_base 1: mod_base = OTHER; note = 2'-O-methylguanosine-3'- phosphorothioate
  modified_base 2: mod_base = OTHER; note = 2'-O-methyluridine-3'-phosphorothioate
  modified_base 3: mod_base = OTHER; note = 2'-O-methylcytidine-3'-phosphate
  modified_base 4: mod_base = OTHER; note = 2'-O-methyluridine-3'-phosphate
  modified_base 5: mod_base = OTHER; note = 2'-O-methylguanosine-3'-phosphate
  modified_base 6: mod_base = OTHER; note = 2'-O-hexadecyl-adenosine-3'-phosphate
  modified_base 7: mod_base = OTHER; note = 2'-fluoroguanosine-3'-phosphate
  modified_base 8: mod_base = OTHER; note = 2'-O-methyladenosine-3'-phosphate
  modified_base 9: mod_base = OTHER; note = 2'-fluoroguanosine-3'-phosphate
  modified_base 10: mod_base = OTHER; note = 2'-fluoroguanosine-3'-phosphate
  modified_base 11: mod_base = OTHER; note = 2'-fluoroguanosine-3'-phosphate
  modified_base 12: mod_base = OTHER; note = 2'-O-methyladenosine-3'-phosphate
  modified_base 13: mod_base = OTHER; note = 2'-O-methyladenosine-3'-phosphate
  modified_base 14: mod_base = OTHER; note = 2'-O-methylguanosine-3'-phosphate
  modified_base 15: mod_base = OTHER; note = 2'-O-methyladenosine-3'-phosphate
  modified_base 16: mod_base = OTHER; note = 2'-O-methylguanosine-3'-phosphate
  modified_base 17: mod_base = OTHER; note = 2'-O-methylguanosine-3'-phosphate
  modified_base 18: mod_base = OTHER; note = 2'-O-methylguanosine-3'-phosphate
  modified_base 19: mod_base = OTHER; note = 2'-O-methylcytidine-3'-phosphate
  modified_base 20: mod_base = OTHER; note = 2'-O-methyluridine-3'-phosphate
  modified_base 21: mod_base = OTHER; note = 2'-O-methyladenosine-3'-phosphate N-[tris(GalNAc-alkyl)-amidodecanoyl)]-4-hydroxyprolinol Hyp-(GalNAc-alkyl)3 (2S,4R)-1-[29-[[2-(acetylamino)-2-deoxy-beta-D-galactopyran osyl]oxy]-14,14-bis[[3-[[3-[[5-[[2-(acetylamino)-2-deoxy-be ta-D-galactopyranosyl]oxy]-1-oxopentyl]amino]propyl]amino]- 3-oxopropoxy]methyl]-1,12,19,25-tetraoxo-16-oxa-13,20,24-tr iazanonacos-1-yl]-4-hydroxy-2-hydroxymethylpyrrolidine
gtctgagagggaagagggcta

SEQ ID NO: 739 - RNA, 21 nt, synthetic construct
  source 1..21: mol_type = other RNA
  modified_base 1: mod_base = OTHER; note = 2'-O-methyluridine-3'-phosphorothioate
  modified_base 2: mod_base = OTHER; note = 2'-O-methylcytidine-3'- phosphorothioate
  modified_base 3: mod_base = OTHER; note = 2'-O-methyluridine-3'-phosphate
  modified_base 4: mod_base = OTHER; note = 2'-O-methylguanosine-3'-phosphate
  modified_base 5: mod_base = OTHER; note = 2'-O-methyladenosine-3'-phosphate
  modified_base 6: mod_base = OTHER; note = 2'-O-hexadecyl-guanosine-3'-phosphate
  modified_base 7: mod_base = OTHER; note = 2'-fluoroadenosine-3'-phosphate
  modified_base 8: mod_base = OTHER; note = 2'-O-methylguanosine-3'-phosphate
  modified_base 9: mod_base = OTHER; note = 2'-fluoroguanosine-3'-phosphate
  modified_base 10: mod_base = OTHER; note = 2'-fluoroguanosine-3'-phosphate
  modified_base 11: mod_base = OTHER; note = 2'-fluoroadenosine-3'-phosphate
  modified_base 12: mod_base = OTHER; note = 2'-O-methyladenosine-3'-phosphate
  modified_base 13: mod_base = OTHER; note = 2'-O-methylguanosine-3'-phosphate
  modified_base 14: mod_base = OTHER; note = 2'-O-methyladenosine-3'-phosphate
  modified_base 15: mod_base = OTHER; note = 2'-O-methylguanosine-3'-phosphate
  modified_base 16: mod_base = OTHER; note = 2'-O-methylguanosine-3'-phosphate
  modified_base 17: mod_base = OTHER; note = 2'-O-methylguanosine-3'-phosphate
  modified_base 18: mod_base = OTHER; note = 2'-O-methylcytidine-3'-phosphate
  modified_base 19: mod_base = OTHER; note = 2'-O-methyluridine-3'-phosphate
  modified_base 20: mod_base = OTHER; note = 2'-O-methylguanosine-3'-phosphate
  modified_base 21: mod_base = OTHER; note = 2'-O-methyladenosine-3'-phosphate N-[tris(GalNAc-alkyl)-amidodecanoyl)]-4-hydroxyprolinol Hyp-(GalNAc-alkyl)3 (2S,4R)-1-[29-[[2-(acetylamino)-2-deoxy-beta-D-galactopyran osyl]oxy]-14,14-bis[[3-[[3-[[5-[[2-(acetylamino)-2-deoxy-be ta-D-galactopyranosyl]oxy]-1-oxopentyl]amino]propyl]amino]- 3-oxopropoxy]methyl]-1,12,19,25-tetraoxo-16-oxa-13,20,24-tr iazanonacos-1-yl]-4-hydroxy-2-hydroxymethylpyrrolidine
tctgagagggaagagggctga

SEQ ID NO: 740 - RNA, 21 nt, synthetic construct
  source 1..21: mol_type = other RNA
  modified_base 1: mod_base = OTHER; note = 2'-O-methyluridine-3'-phosphorothioate
  modified_base 2: mod_base = OTHER; note = 2'-O-methylcytidine-3'- phosphorothioate
  modified_base 3: mod_base = OTHER; note = 2'-O-methyluridine-3'-phosphate
  modified_base 4: mod_base = OTHER; note = 2'-O-methylguanosine-3'-phosphate
  modified_base 5: mod_base = OTHER; note = 2'-O-methyladenosine-3'-phosphate
  modified_base 6: mod_base = OTHER; note = 2'-O-hexadecyl-guanosine-3'-phosphate
  modified_base 7: mod_base = OTHER; note = 2'-O-methyladenosine-3'-phosphate
  modified_base 8: mod_base = OTHER; note = 2'-O-methylguanosine-3'-phosphate
  modified_base 9: mod_base = OTHER; note = 2'-fluoroguanosine-3'-phosphate
  modified_base 10: mod_base = OTHER; note = 2'-fluoroguanosine-3'-phosphate
  modified_base 11: mod_base = OTHER; note = 2'-fluoroadenosine-3'-phosphate
  modified_base 12: mod_base = OTHER; note = 2'-O-methyladenosine-3'-phosphate
  modified_base 13: mod_base = OTHER; note = 2'-O-methylguanosine-3'-phosphate
  modified_base 14: mod_base = OTHER; note = 2'-O-methyladenosine-3'-phosphate
  modified_base 15: mod_base = OTHER; note = 2'-O-methylguanosine-3'-phosphate
  modified_base 16: mod_base = OTHER; note = 2'-O-methylguanosine-3'-phosphate
  modified_base 17: mod_base = OTHER; note = 2'-O-methylguanosine-3'-phosphate
  modified_base 18: mod_base = OTHER; note = 2'-O-methylcytidine-3'-phosphate
  modified_base 19: mod_base = OTHER; note = 2'-O-methyluridine-3'-phosphate
  modified_base 20: mod_base = OTHER; note = 2'-O-methylguanosine-3'-phosphate
  modified_base 21: mod_base = OTHER; note = 2'-O-methyladenosine-3'-phosphate N-[tris(GalNAc-alkyl)-amidodecanoyl)]-4-hydroxyprolinol Hyp-(GalNAc-alkyl)3 (2S,4R)-1-[29-[[2-(acetylamino)-2-deoxy-beta-D-galactopyran osyl]oxy]-14,14-bis[[3-[[3-[[5-[[2-(acetylamino)-2-deoxy-be ta-D-galactopyranosyl]oxy]-1-oxopentyl]amino]propyl]amino]- 3-oxopropoxy]methyl]-1,12,19,25-tetraoxo-16-oxa-13,20,24-tr iazanonacos-1-yl]-4-hydroxy-2-hydroxymethylpyrrolidine
tctgagagggaagagggctga

SEQ ID NO: 741 - RNA, 21 nt, synthetic construct
  source 1..21: mol_type = other RNA
  modified_base 1: mod_base = OTHER; note = 2'-O-methylcytidine-3'- phosphorothioate
  modified_base 2: mod_base = OTHER; note = 2'-O-methyluridine-3'-phosphorothioate
  modified_base 3: mod_base = OTHER; note = 2'-O-methylguanosine-3'-phosphate
  modified_base 4: mod_base = OTHER; note = 2'-O-methyladenosine-3'-phosphate
  modified_base 5: mod_base = OTHER; note = 2'-O-methylguanosine-3'-phosphate
  modified_base 6: mod_base = OTHER; note = 2'-O-hexadecyl-adenosine-3'-phosphate
  modified_base 7: mod_base = OTHER; note = 2'-fluoroguanosine-3'-phosphate
  modified_base 8: mod_base = OTHER; note = 2'-O-methylguanosine-3'-phosphate
  modified_base 9: mod_base = OTHER; note = 2'-fluoroguanosine-3'-phosphate
  modified_base 10: mod_base = OTHER; note = 2'-fluoroadenosine-3'-phosphate
  modified_base 11: mod_base = OTHER; note = 2'-fluoroadenosine-3'-phosphate
  modified_base 12: mod_base = OTHER; note = 2'-O-methylguanosine-3'-phosphate
  modified_base 13: mod_base = OTHER; note = 2'-O-methyladenosine-3'-phosphate
  modified_base 14: mod_base = OTHER; note = 2'-O-methylguanosine-3'-phosphate
  modified_base 15: mod_base = OTHER; note = 2'-O-methylguanosine-3'-phosphate
  modified_base 16: mod_base = OTHER; note = 2'-O-methylguanosine-3'-phosphate
  modified_base 17: mod_base = OTHER; note = 2'-O-methylcytidine-3'-phosphate
  modified_base 18: mod_base = OTHER; note = 2'-O-methyluridine-3'-phosphate
  modified_base 19: mod_base = OTHER; note = 2'-O-methylguanosine-3'-phosphate
  modified_base 20: mod_base = OTHER; note = 2'-O-methylguanosine-3'-phosphate
  modified_base 21: mod_base = OTHER; note = 2'-O-methyladenosine-3'-phosphate N-[tris(GalNAc-alkyl)-amidodecanoyl)]-4-hydroxyprolinol Hyp-(GalNAc-alkyl)3 (2S,4R)-1-[29-[[2-(acetylamino)-2-deoxy-beta-D-galactopyran osyl]oxy]-14,14-bis[[3-[[3-[[5-[[2-(acetylamino)-2-deoxy-be ta-D-galactopyranosyl]oxy]-1-oxopentyl]amino]propyl]amino]- 3-oxopropoxy]methyl]-1,12,19,25-tetraoxo-16-oxa-13,20,24-tr iazanonacos-1-yl]-4-hydroxy-2-hydroxymethylpyrrolidine
ctgagagggaagagggctgga

SEQ ID NO: 742 - RNA, 21 nt, synthetic construct
  source 1..21: mol_type = other RNA
  modified_base 1: mod_base = OTHER; note = 2'-O-methylcytidine-3'- phosphorothioate
  modified_base 2: mod_base = OTHER; note = 2'-O-methyluridine-3'-phosphorothioate
  modified_base 3: mod_base = OTHER; note = 2'-O-methylguanosine-3'-phosphate
  modified_base 4: mod_base = OTHER; note = 2'-O-methyladenosine-3'-phosphate
  modified_base 5: mod_base = OTHER; note = 2'-O-methylguanosine-3'-phosphate
  modified_base 6: mod_base = OTHER; note = 2'-O-hexadecyl-adenosine-3'-phosphate
  modified_base 7: mod_base = OTHER; note = 2'-O-methylguanosine-3'-phosphate
  modified_base 8: mod_base = OTHER; note = 2'-O-methylguanosine-3'-phosphate
  modified_base 9: mod_base = OTHER; note = 2'-fluoroguanosine-3'-phosphate
  modified_base 10: mod_base = OTHER; note = 2'-fluoroadenosine-3'-phosphate
  modified_base 11: mod_base = OTHER; note = 2'-fluoroadenosine-3'-phosphate
  modified_base 12: mod_base = OTHER; note = 2'-O-methylguanosine-3'-phosphate
  modified_base 13: mod_base = OTHER; note = 2'-O-methyladenosine-3'-phosphate
  modified_base 14: mod_base = OTHER; note = 2'-O-methylguanosine-3'-phosphate
  modified_base 15: mod_base = OTHER; note = 2'-O-methylguanosine-3'-phosphate
  modified_base 16: mod_base = OTHER; note = 2'-O-methylguanosine-3'-phosphate
  modified_base 17: mod_base = OTHER; note = 2'-O-methylcytidine-3'-phosphate
  modified_base 18: mod_base = OTHER; note = 2'-O-methyluridine-3'-phosphate
  modified_base 19: mod_base = OTHER; note = 2'-O-methylguanosine-3'-phosphate
  modified_base 20: mod_base = OTHER; note = 2'-O-methylguanosine-3'-phosphate
  modified_base 21: mod_base = OTHER; note = 2'-O-methyladenosine-3'-phosphate N-[tris(GalNAc-alkyl)-amidodecanoyl)]-4-hydroxyprolinol Hyp-(GalNAc-alkyl)3 (2S,4R)-1-[29-[[2-(acetylamino)-2-deoxy-beta-D-galactopyran osyl]oxy]-14,14-bis[[3-[[3-[[5-[[2-(acetylamino)-2-deoxy-be ta-D-galactopyranosyl]oxy]-1-oxopentyl]amino]propyl]amino]- 3-oxopropoxy]methyl]-1,12,19,25-tetraoxo-16-oxa-13,20,24-tr iazanonacos-1-yl]-4-hydroxy-2-hydroxymethylpyrrolidine
ctgagagggaagagggctgga

SEQ ID NO: 743 - RNA, 21 nt, synthetic construct
  source 1..21: mol_type = other RNA
  modified_base 1: mod_base = OTHER; note = 2'-O-methyluridine-3'-phosphorothioate
  modified_base 2: mod_base = OTHER; note = 2'-O-methyluridine-3'-phosphorothioate
  modified_base 3: mod_base = OTHER; note = 2'-O-methyluridine-3'-phosphate
  modified_base 4: mod_base = OTHER; note = 2'-O-methylguanosine-3'-phosphate
  modified_base 5: mod_base = OTHER; note = 2'-O-methylguanosine-3'-phosphate
  modified_base 6: mod_base = OTHER; note = 2'-O-hexadecyl-adenosine-3'-phosphate
  modified_base 7: mod_base = OTHER; note = 2'-fluoroguanosine-3'-phosphate
  modified_base 8: mod_base = OTHER; note = 2'-O-methylcytidine-3'-phosphate
  modified_base 9: mod_base = OTHER; note = 2'-fluorouridine-3'-phosphate
  modified_base 10: mod_base = OTHER; note = 2'-fluoroguanosine-3'-phosphate
  modified_base 11: mod_base = OTHER; note = 2'-fluoroguanosine-3'-phosphate
  modified_base 12: mod_base = OTHER; note = 2'-O-methyladenosine-3'-phosphate
  modified_base 13: mod_base = OTHER; note = 2'-O-methylguanosine-3'-phosphate
  modified_base 14: mod_base = OTHER; note = 2'-O-methyladenosine-3'-phosphate
  modified_base 15: mod_base = OTHER; note = 2'-O-methylguanosine-3'-phosphate
  modified_base 16: mod_base = OTHER; note = 2'-O-methyladenosine-3'-phosphate
  modified_base 17: mod_base = OTHER; note = 2'-O-methyluridine-3'-phosphate
  modified_base 18: mod_base = OTHER; note = 2'-O-methylguanosine-3'-phosphate
  modified_base 19: mod_base = OTHER; note = 2'-O-methyluridine-3'-phosphate
  modified_base 20: mod_base = OTHER; note = 2'-O-methylguanosine-3'-phosphate
  modified_base 21: mod_base = OTHER; note = 2'-O-methyladenosine-3'-phosphate N-[tris(GalNAc-alkyl)-amidodecanoyl)]-4-hydroxyprolinol Hyp-(GalNAc-alkyl)3 (2S,4R)-1-[29-[[2-(acetylamino)-2-deoxy-beta-D-galactopyran osyl]oxy]-14,14-bis[[3-[[3-[[5-[[2-(acetylamino)-2-deoxy-be ta-D-galactopyranosyl]oxy]-1-oxopentyl]amino]propyl]amino]- 3-oxopropoxy]methyl]-1,12,19,25-tetraoxo-16-oxa-13,20,24-tr iazanonacos-1-yl]-4-hydroxy-2-hydroxymethylpyrrolidine
tttggagctggagagatgtga

SEQ ID NO: 744 - RNA, 21 nt, synthetic construct
  source 1..21: mol_type = other RNA
  modified_base 1: mod_base = OTHER; note = 2'-O-methyluridine-3'-phosphorothioate
  modified_base 2: mod_base = OTHER; note = 2'-O-methyluridine-3'-phosphorothioate
  modified_base 3: mod_base = OTHER; note = 2'-O-methyluridine-3'-phosphate
  modified_base 4: mod_base = OTHER; note = 2'-O-methylguanosine-3'-phosphate
  modified_base 5: mod_base = OTHER; note = 2'-O-methylguanosine-3'-phosphate
  modified_base 6: mod_base = OTHER; note = 2'-O-hexadecyl-adenosine-3'-phosphate
  modified_base 7: mod_base = OTHER; note = 2'-O-methylguanosine-3'-phosphate
  modified_base 8: mod_base = OTHER; note = 2'-O-methylcytidine-3'-phosphate
  modified_base 9: mod_base = OTHER; note = 2'-fluorouridine-3'-phosphate
  modified_base 10: mod_base = OTHER; note = 2'-fluoroguanosine-3'-phosphate
  modified_base 11: mod_base = OTHER; note = 2'-fluoroguanosine-3'-phosphate
  modified_base 12: mod_base = OTHER; note = 2'-O-methyladenosine-3'-phosphate
  modified_base 13: mod_base = OTHER; note = 2'-O-methylguanosine-3'-phosphate
  modified_base 14: mod_base = OTHER; note = 2'-O-methyladenosine-3'-phosphate
  modified_base 15: mod_base = OTHER; note = 2'-O-methylguanosine-3'-phosphate
  modified_base 16: mod_base = OTHER; note = 2'-O-methyladenosine-3'-phosphate
  modified_base 17: mod_base = OTHER; note = 2'-O-methyluridine-3'-phosphate
  modified_base 18: mod_base = OTHER; note = 2'-O-methylguanosine-3'-phosphate
  modified_base 19: mod_base = OTHER; note = 2'-O-methyluridine-3'-phosphate
  modified_base 20: mod_base = OTHER; note = 2'-O-methylguanosine-3'-phosphate
  modified_base 21: mod_base = OTHER; note = 2'-O-methyladenosine-3'-phosphate N-[tris(GalNAc-alkyl)-amidodecanoyl)]-4-hydroxyprolinol Hyp-(GalNAc-alkyl)3 (2S,4R)-1-[29-[[2-(acetylamino)-2-deoxy-beta-D-galactopyran osyl]oxy]-14,14-bis[[3-[[3-[[5-[[2-(acetylamino)-2-deoxy-be ta-D-galactopyranosyl]oxy]-1-oxopentyl]amino]propyl]amino]- 3-oxopropoxy]methyl]-1,12,19,25-tetraoxo-16-oxa-13,20,24-tr iazanonacos-1-yl]-4-hydroxy-2-hydroxymethylpyrrolidine
tttggagctggagagatgtga

SEQ ID NO: 745 - RNA, 21 nt, synthetic construct
  source 1..21: mol_type = other RNA
  modified_base 1: mod_base = OTHER; note = 2'-O-methyluridine-3'-phosphorothioate
  modified_base 2: mod_base = OTHER; note = 2'-O-methyluridine-3'-phosphorothioate
  modified_base 3: mod_base = OTHER; note = 2'-O-methylguanosine-3'-phosphate
  modified_base 4: mod_base = OTHER; note = 2'-O-methylguanosine-3'-phosphate
  modified_base 5: mod_base = OTHER; note = 2'-O-methyladenosine-3'-phosphate
  modified_base 6: mod_base = OTHER; note = 2'-O-hexadecyl-guanosine-3'-phosphate
  modified_base 7: mod_base = OTHER; note = 2'-fluorocytidine-3'-phosphate
  modified_base 8: mod_base = OTHER; note = 2'-O-methyluridine-3'-phosphate
  modified_base 9: mod_base = OTHER; note = 2'-fluoroguanosine-3'-phosphate
  modified_base 10: mod_base = OTHER; note = 2'-fluoroguanosine-3'-phosphate
  modified_base 11: mod_base = OTHER; note = 2'-fluoroadenosine-3'-phosphate
  modified_base 12: mod_base = OTHER; note = 2'-O-methylguanosine-3'-phosphate
  modified_base 13: mod_base = OTHER; note = 2'-O-methyladenosine-3'-phosphate
  modified_base 14: mod_base = OTHER; note = 2'-O-methylguanosine-3'-phosphate
  modified_base 15: mod_base = OTHER; note = 2'-O-methyladenosine-3'-phosphate
  modified_base 16: mod_base = OTHER; note = 2'-O-methyluridine-3'-phosphate
  modified_base 17: mod_base = OTHER; note = 2'-O-methylguanosine-3'-phosphate
  modified_base 18: mod_base = OTHER; note = 2'-O-methyluridine-3'-phosphate
  modified_base 19: mod_base = OTHER; note = 2'-O-methylguanosine-3'-phosphate
  modified_base 20: mod_base = OTHER; note = 2'-O-methylguanosine-3'-phosphate
  modified_base 21: mod_base = OTHER; note = 2'-O-methyladenosine-3'-phosphate N-[tris(GalNAc-alkyl)-amidodecanoyl)]-4-hydroxyprolinol Hyp-(GalNAc-alkyl)3 (2S,4R)-1-[29-[[2-(acetylamino)-2-deoxy-beta-D-galactopyran osyl]oxy]-14,14-bis[[3-[[3-[[5-[[2-(acetylamino)-2-deoxy-be ta-D-galactopyranosyl]oxy]-1-oxopentyl]amino]propyl]amino]- 3-oxopropoxy]methyl]-1,12,19,25-tetraoxo-16-oxa-13,20,24-tr iazanonacos-1-yl]-4-hydroxy-2-hydroxymethylpyrrolidine
ttggagctggagagatgtgga

SEQ ID NO: 746 - RNA, 21 nt, synthetic construct
  source 1..21: mol_type = other RNA
  modified_base 1: mod_base = OTHER; note = 2'-O-methyluridine-3'-phosphorothioate
  modified_base 2: mod_base = OTHER; note = 2'-O-methyluridine-3'-phosphorothioate
  modified_base 3: mod_base = OTHER; note = 2'-O-methylguanosine-3'-phosphate
  modified_base 4: mod_base = OTHER; note = 2'-O-methylguanosine-3'-phosphate
  modified_base 5: mod_base = OTHER; note = 2'-O-methyladenosine-3'-phosphate
  modified_base 6: mod_base = OTHER; note = 2'-O-hexadecyl-guanosine-3'-phosphate
  modified_base 7: mod_base = OTHER; note = 2'-O-methylcytidine-3'-phosphate
  modified_base 8: mod_base = OTHER; note = 2'-O-methyluridine-3'-phosphate
  modified_base 9: mod_base = OTHER; note = 2'-fluoroguanosine-3'-phosphate
  modified_base 10: mod_base = OTHER; note = 2'-fluoroguanosine-3'-phosphate
  modified_base 11: mod_base = OTHER; note = 2'-fluoroadenosine-3'-phosphate
  modified_base 12: mod_base = OTHER; note = 2'-O-methylguanosine-3'-phosphate
  modified_base 13: mod_base = OTHER; note = 2'-O-methyladenosine-3'-phosphate
  modified_base 14: mod_base = OTHER; note = 2'-O-methylguanosine-3'-phosphate
  modified_base 15: mod_base = OTHER; note = 2'-O-methyladenosine-3'-phosphate
  modified_base 16: mod_base = OTHER; note = 2'-O-methyluridine-3'-phosphate
  modified_base 17: mod_base = OTHER; note = 2'-O-methylguanosine-3'-phosphate
  modified_base 18: mod_base = OTHER; note = 2'-O-methyluridine-3'-phosphate
  modified_base 19: mod_base = OTHER; note = 2'-O-methylguanosine-3'-phosphate
  modified_base 20: mod_base = OTHER; note = 2'-O-methylguanosine-3'-phosphate
  modified_base 21: mod_base = OTHER; note = 2'-O-methyladenosine-3'-phosphate N-[tris(GalNAc-alkyl)-amidodecanoyl)]-4-hydroxyprolinol Hyp-(GalNAc-alkyl)3 (2S,4R)-1-[29-[[2-(acetylamino)-2-deoxy-beta-D-galactopyran osyl]oxy]-14,14-bis[[3-[[3-[[5-[[2-(acetylamino)-2-deoxy-be ta-D-galactopyranosyl]oxy]-1-oxopentyl]amino]propyl]amino]- 3-oxopropoxy]methyl]-1,12,19,25-tetraoxo-16-oxa-13,20,24-tr iazanonacos-1-yl]-4-hydroxy-2-hydroxymethylpyrrolidine
ttggagctggagagatgtgga

SEQ ID NO: 747 - RNA, 21 nt, synthetic construct
  source 1..21: mol_type = other RNA
  modified_base 1: mod_base = OTHER; note = 2'-O-methylguanosine-3'- phosphorothioate
  modified_base 2: mod_base = OTHER; note = 2'-O-methylcytidine-3'- phosphorothioate
  modified_base 3: mod_base = OTHER; note = 2'-O-methyladenosine-3'-phosphate
  modified_base 4: mod_base = OTHER; note = 2'-O-methylguanosine-3'-phosphate
  modified_base 5: mod_base = OTHER; note = 2'-O-methyluridine-3'-phosphate
  modified_base 6: mod_base = OTHER; note = 2'-O-hexadecyl-guanosine-3'-phosphate
  modified_base 7: mod_base = OTHER; note = 2'-fluoroguanosine-3'-phosphate
  modified_base 8: mod_base = OTHER; note = 2'-O-methyladenosine-3'-phosphate
  modified_base 9: mod_base = OTHER; note = 2'-fluorouridine-3'-phosphate
  modified_base 10: mod_base = OTHER; note = 2'-fluoroguanosine-3'-phosphate
  modified_base 11: mod_base = OTHER; note = 2'-fluoroadenosine-3'-phosphate
  modified_base 12: mod_base = OTHER; note = 2'-O-methylcytidine-3'-phosphate
  modified_base 13: mod_base = OTHER; note = 2'-O-methyladenosine-3'-phosphate
  modified_base 14: mod_base = OTHER; note = 2'-O-methyluridine-3'-phosphate
  modified_base 15: mod_base = OTHER; note = 2'-O-methyladenosine-3'-phosphate
  modified_base 16: mod_base = OTHER; note = 2'-O-methyladenosine-3'-phosphate
  modified_base 17: mod_base = OTHER; note = 2'-O-methyluridine-3'-phosphate
  modified_base 18: mod_base = OTHER; note = 2'-O-methylguanosine-3'-phosphate
  modified_base 19: mod_base = OTHER; note = 2'-O-methylcytidine-3'-phosphate
  modified_base 20: mod_base = OTHER; note = 2'-O-methyluridine-3'-phosphate
  modified_base 21: mod_base = OTHER; note = 2'-O-methyladenosine-3'-phosphate N-[tris(GalNAc-alkyl)-amidodecanoyl)]-4-hydroxyprolinol Hyp-(GalNAc-alkyl)3 (2S,4R)-1-[29-[[2-(acetylamino)-2-deoxy-beta-D-galactopyran osyl]oxy]-14,14-bis[[3-[[3-[[5-[[2-(acetylamino)-2-deoxy-be ta-D-galactopyranosyl]oxy]-1-oxopentyl]amino]propyl]amino]- 3-oxopropoxy]methyl]-1,12,19,25-tetraoxo-16-oxa-13,20,24-tr iazanonacos-1-yl]-4-hydroxy-2-hydroxymethylpyrrolidine
gcagtggatgacataatgcta

SEQ ID NO: 748 - RNA, 21 nt, synthetic construct
  source 1..21: mol_type = other RNA
  modified_base 1: mod_base = OTHER; note = 2'-O-methylguanosine-3'- phosphorothioate
  modified_base 2: mod_base = OTHER; note = 2'-O-methylcytidine-3'- phosphorothioate
  modified_base 3: mod_base = OTHER; note = 2'-O-methyladenosine-3'-phosphate
  modified_base 4: mod_base = OTHER; note = 2'-O-methylguanosine-3'-phosphate
  modified_base 5: mod_base = OTHER; note = 2'-O-methyluridine-3'-phosphate
  modified_base 6: mod_base = OTHER; note = 2'-O-hexadecyl-guanosine-3'-phosphate
  modified_base 7: mod_base = OTHER; note = 2'-O-methylguanosine-3'-phosphate
  modified_base 8: mod_base = OTHER; note = 2'-O-methyladenosine-3'-phosphate
  modified_base 9: mod_base = OTHER; note = 2'-fluorouridine-3'-phosphate
  modified_base 10: mod_base = OTHER; note = 2'-fluoroguanosine-3'-phosphate
  modified_base 11: mod_base = OTHER; note = 2'-fluoroadenosine-3'-phosphate
  modified_base 12: mod_base = OTHER; note = 2'-O-methylcytidine-3'-phosphate
  modified_base 13: mod_base = OTHER; note = 2'-O-methyladenosine-3'-phosphate
  modified_base 14: mod_base = OTHER; note = 2'-O-methyluridine-3'-phosphate
  modified_base 15: mod_base = OTHER; note = 2'-O-methyladenosine-3'-phosphate
  modified_base 16: mod_base = OTHER; note = 2'-O-methyladenosine-3'-phosphate
  modified_base 17: mod_base = OTHER; note = 2'-O-methyluridine-3'-phosphate
  modified_base 18: mod_base = OTHER; note = 2'-O-methylguanosine-3'-phosphate
  modified_base 19: mod_base = OTHER; note = 2'-O-methylcytidine-3'-phosphate
  modified_base 20: mod_base = OTHER; note = 2'-O-methyluridine-3'-phosphate
  modified_base 21: mod_base = OTHER; note = 2'-O-methyladenosine-3'-phosphate N-[tris(GalNAc-alkyl)-amidodecanoyl)]-4-hydroxyprolinol Hyp-(GalNAc-alkyl)3 (2S,4R)-1-[29-[[2-(acetylamino)-2-deoxy-beta-D-galactopyran osyl]oxy]-14,14-bis[[3-[[3-[[5-[[2-(acetylamino)-2-deoxy-be ta-D-galactopyranosyl]oxy]-1-oxopentyl]amino]propyl]amino]- 3-oxopropoxy]methyl]-1,12,19,25-tetraoxo-16-oxa-13,20,24-tr iazanonacos-1-yl]-4-hydroxy-2-hydroxymethylpyrrolidine
gcagtggatgacataatgcta

SEQ ID NO: 749 - RNA, 21 nt, synthetic construct
  source 1..21: mol_type = other RNA
  modified_base 1: mod_base = OTHER; note = 2'-O-methylcytidine-3'- phosphorothioate
  modified_base 2: mod_base = OTHER; note = 2'-O-methyladenosine-3'- phosphorothioate
  modified_base 3: mod_base = OTHER; note = 2'-O-methylguanosine-3'-phosphate
  modified_base 4: mod_base = OTHER; note = 2'-O-methyluridine-3'-phosphate
  modified_base 5: mod_base = OTHER; note = 2'-O-methylguanosine-3'-phosphate
  modified_base 6: mod_base = OTHER; note = 2'-O-hexadecyl-guanosine-3'-phosphate
  modified_base 7: mod_base = OTHER; note = 2'-fluoroadenosine-3'-phosphate
  modified_base 8: mod_base = OTHER; note = 2'-O-methyluridine-3'-phosphate
  modified_base 9: mod_base = OTHER; note = 2'-fluoroguanosine-3'-phosphate
  modified_base 10: mod_base = OTHER; note = 2'-fluoroadenosine-3'-phosphate
  modified_base 11: mod_base = OTHER; note = 2'-fluorocytidine-3'-phosphate
  modified_base 12: mod_base = OTHER; note = 2'-O-methyladenosine-3'-phosphate
  modified_base 13: mod_base = OTHER; note = 2'-O-methyluridine-3'-phosphate
  modified_base 14: mod_base = OTHER; note = 2'-O-methyladenosine-3'-phosphate
  modified_base 15: mod_base = OTHER; note = 2'-O-methyladenosine-3'-phosphate
  modified_base 16: mod_base = OTHER; note = 2'-O-methyluridine-3'-phosphate
  modified_base 17: mod_base = OTHER; note = 2'-O-methylguanosine-3'-phosphate
  modified_base 18: mod_base = OTHER; note = 2'-O-methylcytidine-3'-phosphate
  modified_base 19: mod_base = OTHER; note = 2'-O-methyluridine-3'-phosphate
  modified_base 20: mod_base = OTHER; note = 2'-O-methyluridine-3'-phosphate
  modified_base 21: mod_base = OTHER; note = 2'-O-methyladenosine-3'-phosphate N-[tris(GalNAc-alkyl)-amidodecanoyl)]-4-hydroxyprolinol Hyp-(GalNAc-alkyl)3 (2S,4R)-1-[29-[[2-(acetylamino)-2-deoxy-beta-D-galactopyran osyl]oxy]-14,14-bis[[3-[[3-[[5-[[2-(acetylamino)-2-deoxy-be ta-D-galactopyranosyl]oxy]-1-oxopentyl]amino]propyl]amino]- 3-oxopropoxy]methyl]-1,12,19,25-tetraoxo-16-oxa-13,20,24-tr iazanonacos-1-yl]-4-hydroxy-2-hydroxymethylpyrrolidine
cagtggatgacataatgctta

SEQ ID NO: 750 - RNA, 21 nt, synthetic construct
  source 1..21: mol_type = other RNA
  modified_base 1: mod_base = OTHER; note = 2'-O-methylcytidine-3'- phosphorothioate
  modified_base 2: mod_base = OTHER; note = 2'-O-methyladenosine-3'- phosphorothioate
  modified_base 3: mod_base = OTHER; note = 2'-O-methylguanosine-3'-phosphate
  modified_base 4: mod_base = OTHER; note = 2'-O-methyluridine-3'-phosphate
  modified_base 5: mod_base = OTHER; note = 2'-O-methylguanosine-3'-phosphate
  modified_base 6: mod_base = OTHER; note = 2'-O-hexadecyl-guanosine-3'-phosphate
  modified_base 7: mod_base = OTHER; note = 2'-O-methyladenosine-3'-phosphate
  modified_base 8: mod_base = OTHER; note = 2'-O-methyluridine-3'-phosphate
  modified_base 9: mod_base = OTHER; note = 2'-fluoroguanosine-3'-phosphate
  modified_base 10: mod_base = OTHER; note = 2'-fluoroadenosine-3'-phosphate
  modified_base 11: mod_base = OTHER; note = 2'-fluorocytidine-3'-phosphate
  modified_base 12: mod_base = OTHER; note = 2'-O-methyladenosine-3'-phosphate
  modified_base 13: mod_base = OTHER; note = 2'-O-methyluridine-3'-phosphate
  modified_base 14: mod_base = OTHER; note = 2'-O-methyladenosine-3'-phosphate
  modified_base 15: mod_base = OTHER; note = 2'-O-methyladenosine-3'-phosphate
  modified_base 16: mod_base = OTHER; note = 2'-O-methyluridine-3'-phosphate
  modified_base 17: mod_base = OTHER; note = 2'-O-methylguanosine-3'-phosphate
  modified_base 18: mod_base = OTHER; note = 2'-O-methylcytidine-3'-phosphate
  modified_base 19: mod_base = OTHER; note = 2'-O-methyluridine-3'-phosphate
  modified_base 20: mod_base = OTHER; note = 2'-O-methyluridine-3'-phosphate
  modified_base 21: mod_base = OTHER; note = 2'-O-methyladenosine-3'-phosphate N-[tris(GalNAc-alkyl)-amidodecanoyl)]-4-hydroxyprolinol Hyp-(GalNAc-alkyl)3 (2S,4R)-1-[29-[[2-(acetylamino)-2-deoxy-beta-D-galactopyran osyl]oxy]-14,14-bis[[3-[[3-[[5-[[2-(acetylamino)-2-deoxy-be ta-D-galactopyranosyl]oxy]-1-oxopentyl]amino]propyl]amino]- 3-oxopropoxy]methyl]-1,12,19,25-tetraoxo-16-oxa-13,20,24-tr iazanonacos-1-yl]-4-hydroxy-2-hydroxymethylpyrrolidine
cagtggatgacataatgctta

SEQ ID NO: 751 - RNA, 21 nt, synthetic construct
  source 1..21: mol_type = other RNA
  modified_base 1: mod_base = OTHER; note = 2'-O-methyluridine-3'-phosphorothioate
  modified_base 2: mod_base = OTHER; note = 2'-O-methyladenosine-3'- phosphorothioate
  modified_base 3: mod_base = OTHER; note = 2'-O-methylguanosine-3'-phosphate
  modified_base 4: mod_base = OTHER; note = 2'-O-methylguanosine-3'-phosphate
  modified_base 5: mod_base = OTHER; note = 2'-O-methyladenosine-3'-phosphate
  modified_base 6: mod_base = OTHER; note = 2'-O-hexadecyl-cytidine-3'-phosphate
  modified_base 7: mod_base = OTHER; note = 2'-fluoroguanosine-3'-phosphate
  modified_base 8: mod_base = OTHER; note = 2'-O-methylcytidine-3'-phosphate
  modified_base 9: mod_base = OTHER; note = 2'-fluorocytidine-3'-phosphate
  modified_base 10: mod_base = OTHER; note = 2'-fluorouridine-3'-phosphate
  modified_base 11: mod_base = OTHER; note = 2'-fluorocytidine-3'-phosphate
  modified_base 12: mod_base = OTHER; note = 2'-O-methylguanosine-3'-phosphate
  modified_base 13: mod_base = OTHER; note = 2'-O-methylguanosine-3'-phosphate
  modified_base 14: mod_base = OTHER; note = 2'-O-methylcytidine-3'-phosphate
  modified_base 15: mod_base = OTHER; note = 2'-O-methylguanosine-3'-phosphate
  modified_base 16: mod_base = OTHER; note = 2'-O-methylguanosine-3'-phosphate
  modified_base 17: mod_base = OTHER; note = 2'-O-methylguanosine-3'-phosphate
  modified_base 18: mod_base = OTHER; note = 2'-O-methyladenosine-3'-phosphate
  modified_base 19: mod_base = OTHER; note = 2'-O-methylguanosine-3'-phosphate
  modified_base 20: mod_base = OTHER; note = 2'-O-methyluridine-3'-phosphate
  modified_base 21: mod_base = OTHER; note = 2'-O-methyladenosine-3'-phosphate N-[tris(GalNAc-alkyl)-amidodecanoyl)]-4-hydroxyprolinol Hyp-(GalNAc-alkyl)3 (2S,4R)-1-[29-[[2-(acetylamino)-2-deoxy-beta-D-galactopyran osyl]oxy]-14,14-bis[[3-[[3-[[5-[[2-(acetylamino)-2-deoxy-be ta-D-galactopyranosyl]oxy]-1-oxopentyl]amino]propyl]amino]- 3-oxopropoxy]methyl]-1,12,19,25-tetraoxo-16-oxa-13,20,24-tr iazanonacos-1-yl]-4-hydroxy-2-hydroxymethylpyrrolidine
taggacgcctcggcgggagta

SEQ ID NO: 752 - RNA, 21 nt, synthetic construct
  source 1..21: mol_type = other RNA
  modified_base 1: mod_base = OTHER; note = 2'-O-methyluridine-3'-phosphorothioate
  modified_base 2: mod_base = OTHER; note = 2'-O-methylguanosine-3'- phosphorothioate
  modified_base 3: mod_base = OTHER; note = 2'-O-methyladenosine-3'-phosphate
  modified_base 4: mod_base = OTHER; note = 2'-O-methylguanosine-3'-phosphate
  modified_base 5: mod_base = OTHER; note = 2'-O-methylguanosine-3'-phosphate
  modified_base 6: mod_base = OTHER; note = 2'-O-hexadecyl-guanosine-3'-phosphate
  modified_base 7: mod_base = OTHER; note = 2'-fluorocytidine-3'-phosphate
  modified_base 8: mod_base = OTHER; note = 2'-O-methylguanosine-3'-phosphate
  modified_base 9: mod_base = OTHER; note = 2'-fluorocytidine-3'-phosphate
  modified_base 10: mod_base = OTHER; note = 2'-fluoroguanosine-3'-phosphate
  modified_base 11: mod_base = OTHER; note = 2'-fluorouridine-3'-phosphate
  modified_base 12: mod_base = OTHER; note = 2'-O-methylcytidine-3'-phosphate
  modified_base 13: mod_base = OTHER; note = 2'-O-methylcytidine-3'-phosphate
  modified_base 14: mod_base = OTHER; note = 2'-O-methyladenosine-3'-phosphate
  modified_base 15: mod_base = OTHER; note = 2'-O-methyladenosine-3'-phosphate
  modified_base 16: mod_base = OTHER; note = 2'-O-methyluridine-3'-phosphate
  modified_base 17: mod_base = OTHER; note = 2'-O-methylguanosine-3'-phosphate
  modified_base 18: mod_base = OTHER; note = 2'-O-methylguanosine-3'-phosphate
  modified_base 19: mod_base = OTHER; note = 2'-O-methylguanosine-3'-phosphate
  modified_base 20: mod_base = OTHER; note = 2'-O-methyladenosine-3'-phosphate
  modified_base 21: mod_base = OTHER; note = 2'-O-methyladenosine-3'-phosphate N-[tris(GalNAc-alkyl)-amidodecanoyl)]-4-hydroxyprolinol Hyp-(GalNAc-alkyl)3 (2S,4R)-1-[29-[[2-(acetylamino)-2-deoxy-beta-D-galactopyran osyl]oxy]-14,14-bis[[3-[[3-[[5-[[2-(acetylamino)-2-deoxy-be ta-D-galactopyranosyl]oxy]-1-oxopentyl]amino]propyl]amino]- 3-oxopropoxy]methyl]-1,12,19,25-tetraoxo-16-oxa-13,20,24-tr iazanonacos-1-yl]-4-hydroxy-2-hydroxymethylpyrrolidine
tgagggcgcgtccaatgggaa

SEQ ID NO: 753 - RNA, 21 nt, synthetic construct
  source 1..21: mol_type = other RNA
  modified_base 1: mod_base = OTHER; note = 2'-O-methyluridine-3'-phosphorothioate
  modified_base 2: mod_base = OTHER; note = 2'-O-methylguanosine-3'- phosphorothioate
  modified_base 3: mod_base = OTHER; note = 2'-O-methyladenosine-3'-phosphate
  modified_base 4: mod_base = OTHER; note = 2'-O-methylguanosine-3'-phosphate
  modified_base 5: mod_base = OTHER; note = 2'-O-methylguanosine-3'-phosphate
  modified_base 6: mod_base = OTHER; note = 2'-O-hexadecyl-guanosine-3'-phosphate
  modified_base 7: mod_base = OTHER; note = 2'-O-methylcytidine-3'-phosphate
  modified_base 8: mod_base = OTHER; note = 2'-O-methylguanosine-3'-phosphate
  modified_base 9: mod_base = OTHER; note = 2'-fluorocytidine-3'-phosphate
  modified_base 10: mod_base = OTHER; note = 2'-fluoroguanosine-3'-phosphate
  modified_base 11: mod_base = OTHER; note = 2'-fluorouridine-3'-phosphate
  modified_base 12: mod_base = OTHER; note = 2'-O-methylcytidine-3'-phosphate
  modified_base 13: mod_base = OTHER; note = 2'-O-methylcytidine-3'-phosphate
  modified_base 14: mod_base = OTHER; note = 2'-O-methyladenosine-3'-phosphate
  modified_base 15: mod_base = OTHER; note = 2'-O-methyladenosine-3'-phosphate
  modified_base 16: mod_base = OTHER; note = 2'-O-methyluridine-3'-phosphate
  modified_base 17: mod_base = OTHER; note = 2'-O-methylguanosine-3'-phosphate
  modified_base 18: mod_base = OTHER; note = 2'-O-methylguanosine-3'-phosphate
  modified_base 19: mod_base = OTHER; note = 2'-O-methylguanosine-3'-phosphate
  modified_base 20: mod_base = OTHER; note = 2'-O-methyladenosine-3'-phosphate
  modified_base 21: mod_base = OTHER; note = 2'-O-methyladenosine-3'-phosphate N-[tris(GalNAc-alkyl)-amidodecanoyl)]-4-hydroxyprolinol Hyp-(GalNAc-alkyl)3 (2S,4R)-1-[29-[[2-(acetylamino)-2-deoxy-beta-D-galactopyran osyl]oxy]-14,14-bis[[3-[[3-[[5-[[2-(acetylamino)-2-deoxy-be ta-D-galactopyranosyl]oxy]-1-oxopentyl]amino]propyl]amino]- 3-oxopropoxy]methyl]-1,12,19,25-tetraoxo-16-oxa-13,20,24-tr iazanonacos-1-yl]-4-hydroxy-2-hydroxymethylpyrrolidine
tgagggcgcgtccaatgggaa

SEQ ID NO: 754 - RNA, 21 nt, synthetic construct
  source 1..21: mol_type = other RNA
  modified_base 1: mod_base = OTHER; note = 2'-O-methylguanosine-3'- phosphorothioate
  modified_base 2: mod_base = OTHER; note = 2'-O-methylcytidine-3'- phosphorothioate
  modified_base 3: mod_base = OTHER; note = 2'-O-methylguanosine-3'-phosphate
  modified_base 4: mod_base = OTHER; note = 2'-O-methyluridine-3'-phosphate
  modified_base 5: mod_base = OTHER; note = 2'-O-methylcytidine-3'-phosphate
  modified_base 6: mod_base = OTHER; note = 2'-O-hexadecyl-cytidine-3'-phosphate
  modified_base 7: mod_base = OTHER; note = 2'-fluoroadenosine-3'-phosphate
  modified_base 8: mod_base = OTHER; note = 2'-O-methyladenosine-3'-phosphate
  modified_base 9: mod_base = OTHER; note = 2'-fluorouridine-3'-phosphate
  modified_base 10: mod_base = OTHER; note = 2'-fluoroguanosine-3'-phosphate
  modified_base 11: mod_base = OTHER; note = 2'-fluoroguanosine-3'-phosphate
  modified_base 12: mod_base = OTHER; note = 2'-O-methylguanosine-3'-phosphate
  modified_base 13: mod_base = OTHER; note = 2'-O-methyladenosine-3'-phosphate
  modified_base 14: mod_base = OTHER; note = 2'-O-methylguanosine-3'-phosphate
  modified_base 15: mod_base = OTHER; note = 2'-O-methyladenosine-3'-phosphate
  modified_base 16: mod_base = OTHER; note = 2'-O-methyluridine-3'-phosphate
  modified_base 17: mod_base = OTHER; note = 2'-O-methyluridine-3'-phosphate
  modified_base 18: mod_base = OTHER; note = 2'-O-methyluridine-3'-phosphate
  modified_base 19: mod_base = OTHER; note = 2'-O-methylcytidine-3'-phosphate
  modified_base 20: mod_base = OTHER; note = 2'-O-methyluridine-3'-phosphate
  modified_base 21: mod_base = OTHER; note = 2'-O-methyladenosine-3'-phosphate N-[tris(GalNAc-alkyl)-amidodecanoyl)]-4-hydroxyprolinol Hyp-(GalNAc-alkyl)3 (2S,4R)-1-[29-[[2-(acetylamino)-2-deoxy-beta-D-galactopyran osyl]oxy]-14,14-bis[[3-[[3-[[5-[[2-(acetylamino)-2-deoxy-be ta-D-galactopyranosyl]oxy]-1-oxopentyl]amino]propyl]amino]- 3-oxopropoxy]methyl]-1,12,19,25-tetraoxo-16-oxa-13,20,24-tr iazanonacos-1-yl]-4-hydroxy-2-hydroxymethylpyrrolidine
gcgtccaatgggagatttcta

SEQ ID NO: 755 - RNA, 21 nt, synthetic construct
  source 1..21: mol_type = other RNA
  modified_base 1: mod_base = OTHER; note = 2'-O-methylguanosine-3'- phosphorothioate
  modified_base 2: mod_base = OTHER; note = 2'-O-methylcytidine-3'- phosphorothioate
  modified_base 3: mod_base = OTHER; note = 2'-O-methylguanosine-3'-phosphate
  modified_base 4: mod_base = OTHER; note = 2'-O-methyluridine-3'-phosphate
  modified_base 5: mod_base = OTHER; note = 2'-O-methylcytidine-3'-phosphate
  modified_base 6: mod_base = OTHER; note = 2'-O-hexadecyl-cytidine-3'-phosphate
  modified_base 7: mod_base = OTHER; note = 2'-O-methyladenosine-3'-phosphate
  modified_base 8: mod_base = OTHER; note = 2'-O-methyladenosine-3'-phosphate
  modified_base 9: mod_base = OTHER; note = 2'-fluorouridine-3'-phosphate
  modified_base 10: mod_base = OTHER; note = 2'-fluoroguanosine-3'-phosphate
  modified_base 11: mod_base = OTHER; note = 2'-fluoroguanosine-3'-phosphate
  modified_base 12: mod_base = OTHER; note = 2'-O-methylguanosine-3'-phosphate
  modified_base 13: mod_base = OTHER; note = 2'-O-methyladenosine-3'-phosphate
  modified_base 14: mod_base = OTHER; note = 2'-O-methylguanosine-3'-phosphate
  modified_base 15: mod_base = OTHER; note = 2'-O-methyladenosine-3'-phosphate
  modified_base 16: mod_base = OTHER; note = 2'-O-methyluridine-3'-phosphate
  modified_base 17: mod_base = OTHER; note = 2'-O-methyluridine-3'-phosphate
  modified_base 18: mod_base = OTHER; note = 2'-O-methyluridine-3'-phosphate
  modified_base 19: mod_base = OTHER; note = 2'-O-methylcytidine-3'-phosphate
  modified_base 20: mod_base = OTHER; note = 2'-O-methyluridine-3'-phosphate
  modified_base 21: mod_base = OTHER; note = 2'-O-methyladenosine-3'-phosphate N-[tris(GalNAc-alkyl)-amidodecanoyl)]-4-hydroxyprolinol Hyp-(GalNAc-alkyl)3 (2S,4R)-1-[29-[[2-(acetylamino)-2-deoxy-beta-D-galactopyran osyl]oxy]-14,14-bis[[3-[[3-[[5-[[2-(acetylamino)-2-deoxy-be ta-D-galactopyranosyl]oxy]-1-oxopentyl]amino]propyl]amino]- 3-oxopropoxy]methyl]-1,12,19,25-tetraoxo-16-oxa-13,20,24-tr iazanonacos-1-yl]-4-hydroxy-2-hydroxymethylpyrrolidine
gcgtccaatgggagatttcta

SEQ ID NO: 756 - RNA, 21 nt, synthetic construct
  source 1..21: mol_type = other RNA
  modified_base 1: mod_base = OTHER; note = 2'-O-methylcytidine-3'- phosphorothioate
  modified_base 2: mod_base = OTHER; note = 2'-O-methylguanosine-3'- phosphorothioate
  modified_base 3: mod_base = OTHER; note = 2'-O-methyluridine-3'-phosphate
  modified_base 4: mod_base = OTHER; note = 2'-O-methylcytidine-3'-phosphate
  modified_base 5: mod_base = OTHER; note = 2'-O-methylcytidine-3'-phosphate
  modified_base 6: mod_base = OTHER; note = 2'-O-hexadecyl-adenosine-3'-phosphate
  modified_base 7: mod_base = OTHER; note = 2'-fluoroadenosine-3'-phosphate
  modified_base 8: mod_base = OTHER; note = 2'-O-methyluridine-3'-phosphate
  modified_base 9: mod_base = OTHER; note = 2'-fluoroguanosine-3'-phosphate
  modified_base 10: mod_base = OTHER; note = 2'-fluoroguanosine-3'-phosphate
  modified_base 11: mod_base = OTHER; note = 2'-fluoroguanosine-3'-phosphate
  modified_base 12: mod_base = OTHER; note = 2'-O-methyladenosine-3'-phosphate
  modified_base 13: mod_base = OTHER; note = 2'-O-methylguanosine-3'-phosphate
  modified_base 14: mod_base = OTHER; note = 2'-O-methyladenosine-3'-phosphate
  modified_base 15: mod_base = OTHER; note = 2'-O-methyluridine-3'-phosphate
  modified_base 16: mod_base = OTHER; note = 2'-O-methyluridine-3'-phosphate
  modified_base 17: mod_base = OTHER; note = 2'-O-methyluridine-3'-phosphate
  modified_base 18: mod_base = OTHER; note = 2'-O-methylcytidine-3'-phosphate
  modified_base 19: mod_base = OTHER; note = 2'-O-methyluridine-3'-phosphate
  modified_base 20: mod_base = OTHER; note = 2'-O-methyluridine-3'-phosphate
  modified_base 21: mod_base = OTHER; note = 2'-O-methyladenosine-3'-phosphate N-[tris(GalNAc-alkyl)-amidodecanoyl)]-4-hydroxyprolinol Hyp-(GalNAc-alkyl)3 (2S,4R)-1-[29-[[2-(acetylamino)-2-deoxy-beta-D-galactopyran osyl]oxy]-14,14-bis[[3-[[3-[[5-[[2-(acetylamino)-2-deoxy-be ta-D-galactopyranosyl]oxy]-1-oxopentyl]amino]propyl]amino]- 3-oxopropoxy]methyl]-1,12,19,25-tetraoxo-16-oxa-13,20,24-tr iazanonacos-1-yl]-4-hydroxy-2-hydroxymethylpyrrolidine
cgtccaatgggagatttctta

SEQ ID NO: 757 - RNA, 21 nt, synthetic construct
  source 1..21: mol_type = other RNA
  modified_base 1: mod_base = OTHER; note = 2'-O-methylcytidine-3'- phosphorothioate
  modified_base 2: mod_base = OTHER; note = 2'-O-methylguanosine-3'- phosphorothioate
  modified_base 3: mod_base = OTHER; note = 2'-O-methyluridine-3'-phosphate
  modified_base 4: mod_base = OTHER; note = 2'-O-methylcytidine-3'-phosphate
  modified_base 5: mod_base = OTHER; note = 2'-O-methylcytidine-3'-phosphate
  modified_base 6: mod_base = OTHER; note = 2'-O-hexadecyl-adenosine-3'-phosphate
  modified_base 7: mod_base = OTHER; note = 2'-O-methyladenosine-3'-phosphate
  modified_base 8: mod_base = OTHER; note = 2'-O-methyluridine-3'-phosphate
  modified_base 9: mod_base = OTHER; note = 2'-fluoroguanosine-3'-phosphate
  modified_base 10: mod_base = OTHER; note = 2'-fluoroguanosine-3'-phosphate
  modified_base 11: mod_base = OTHER; note = 2'-fluoroguanosine-3'-phosphate
  modified_base 12: mod_base = OTHER; note = 2'-O-methyladenosine-3'-phosphate
  modified_base 13: mod_base = OTHER; note = 2'-O-methylguanosine-3'-phosphate
  modified_base 14: mod_base = OTHER; note = 2'-O-methyladenosine-3'-phosphate
  modified_base 15: mod_base = OTHER; note = 2'-O-methyluridine-3'-phosphate
  modified_base 16: mod_base = OTHER; note = 2'-O-methyluridine-3'-phosphate
  modified_base 17: mod_base = OTHER; note = 2'-O-methyluridine-3'-phosphate
  modified_base 18: mod_base = OTHER; note = 2'-O-methylcytidine-3'-phosphate
  modified_base 19: mod_base = OTHER; note = 2'-O-methyluridine-3'-phosphate
  modified_base 20: mod_base = OTHER; note = 2'-O-methyluridine-3'-phosphate
  modified_base 21: mod_base = OTHER; note = 2'-O-methyladenosine-3'-phosphate N-[tris(GalNAc-alkyl)-amidodecanoyl)]-4-hydroxyprolinol Hyp-(GalNAc-alkyl)3 (2S,4R)-1-[29-[[2-(acetylamino)-2-deoxy-beta-D-galactopyran osyl]oxy]-14,14-bis[[3-[[3-[[5-[[2-(acetylamino)-2-deoxy-be ta-D-galactopyranosyl]oxy]-1-oxopentyl]amino]propyl]amino]- 3-oxopropoxy]methyl]-1,12,19,25-tetraoxo-16-oxa-13,20,24-tr iazanonacos-1-yl]-4-hydroxy-2-hydroxymethylpyrrolidine
cgtccaatgggagatttctta

SEQ ID NO: 758 - RNA, 21 nt, synthetic construct
  source 1..21: mol_type = other RNA
  modified_base 1: mod_base = OTHER; note = 2'-O-methylcytidine-3'- phosphorothioate
  modified_base 2: mod_base = OTHER; note = 2'-O-methyladenosine-3'- phosphorothioate
  modified_base 3: mod_base = OTHER; note = 2'-O-methylguanosine-3'-phosphate
  modified_base 4: mod_base = OTHER; note = 2'-O-methylcytidine-3'-phosphate
  modified_base 5: mod_base = OTHER; note = 2'-O-methylcytidine-3'-phosphate
  modified_base 6: mod_base = OTHER; note = 2'-O-hexadecyl-uridine-3'-phosphate
  modified_base 7: mod_base = OTHER; note = 2'-fluoroguanosine-3'-phosphate
  modified_base 8: mod_base = OTHER; note = 2'-O-methyladenosine-3'-phosphate
  modified_base 9: mod_base = OTHER; note = 2'-fluoroguanosine-3'-phosphate
  modified_base 10: mod_base = OTHER; note = 2'-fluoroadenosine-3'-phosphate
  modified_base 11: mod_base = OTHER; note = 2'-fluorouridine-3'-phosphate
  modified_base 12: mod_base = OTHER; note = 2'-O-methyluridine-3'-phosphate
  modified_base 13: mod_base = OTHER; note = 2'-O-methyluridine-3'-phosphate
  modified_base 14: mod_base = OTHER; note = 2'-O-methylguanosine-3'-phosphate
  modified_base 15: mod_base = OTHER; note = 2'-O-methyladenosine-3'-phosphate
  modified_base 16: mod_base = OTHER; note = 2'-O-methylguanosine-3'-phosphate
  modified_base 17: mod_base = OTHER; note = 2'-O-methylguanosine-3'-phosphate
  modified_base 18: mod_base = OTHER; note = 2'-O-methylcytidine-3'-phosphate
  modified_base 19: mod_base = OTHER; note = 2'-O-methyluridine-3'-phosphate
  modified_base 20: mod_base = OTHER; note = 2'-O-methylcytidine-3'-phosphate
  modified_base 21: mod_base = OTHER; note = 2'-O-methyladenosine-3'-phosphate N-[tris(GalNAc-alkyl)-amidodecanoyl)]-4-hydroxyprolinol Hyp-(GalNAc-alkyl)3 (2S,4R)-1-[29-[[2-(acetylamino)-2-deoxy-beta-D-galactopyran osyl]oxy]-14,14-bis[[3-[[3-[[5-[[2-(acetylamino)-2-deoxy-be ta-D-galactopyranosyl]oxy]-1-oxopentyl]amino]propyl]amino]- 3-oxopropoxy]methyl]-1,12,19,25-tetraoxo-16-oxa-13,20,24-tr iazanonacos-1-yl]-4-hydroxy-2-hydroxymethylpyrrolidine
cagcctgagatttgaggctca

SEQ ID NO: 759 - RNA, 21 nt, synthetic construct
  source 1..21: mol_type = other RNA
  modified_base 1: mod_base = OTHER; note = 2'-O-methylcytidine-3'- phosphorothioate
  modified_base 2: mod_base = OTHER; note = 2'-O-methyluridine-3'-phosphorothioate
  modified_base 3: mod_base = OTHER; note = 2'-O-methylguanosine-3'-phosphate
  modified_base 4: mod_base = OTHER; note = 2'-O-methyladenosine-3'-phosphate
  modified_base 5: mod_base = OTHER; note = 2'-O-methylguanosine-3'-phosphate
  modified_base 6: mod_base = OTHER; note = 2'-O-hexadecyl-adenosine-3'-phosphate
  modified_base 7: mod_base = OTHER; note = 2'-fluorouridine-3'-phosphate
  modified_base 8: mod_base = OTHER; note = 2'-O-methyluridine-3'-phosphate
  modified_base 9: mod_base = OTHER; note = 2'-fluorouridine-3'-phosphate
  modified_base 10: mod_base = OTHER; note = 2'-fluoroguanosine-3'-phosphate
  modified_base 11: mod_base = OTHER; note = 2'-fluoroadenosine-3'-phosphate
  modified_base 12: mod_base = OTHER; note = 2'-O-methylguanosine-3'-phosphate
  modified_base 13: mod_base = OTHER; note = 2'-O-methylguanosine-3'-phosphate
  modified_base 14: mod_base = OTHER; note = 2'-O-methylcytidine-3'-phosphate
  modified_base 15: mod_base = OTHER; note = 2'-O-methyluridine-3'-phosphate
  modified_base 16: mod_base = OTHER; note = 2'-O-methylcytidine-3'-phosphate
  modified_base 17: mod_base = OTHER; note = 2'-O-methyluridine-3'-phosphate
  modified_base 18: mod_base = OTHER; note = 2'-O-methyluridine-3'-phosphate
  modified_base 19: mod_base = OTHER; note = 2'-O-methylcytidine-3'-phosphate
  modified_base 20: mod_base = OTHER; note = 2'-O-methylcytidine-3'-phosphate
  modified_base 21: mod_base = OTHER; note = 2'-O-methyladenosine-3'-phosphate N-[tris(GalNAc-alkyl)-amidodecanoyl)]-4-hydroxyprolinol Hyp-(GalNAc-alkyl)3 (2S,4R)-1-[29-[[2-(acetylamino)-2-deoxy-beta-D-galactopyran osyl]oxy]-14,14-bis[[3-[[3-[[5-[[2-(acetylamino)-2-deoxy-be ta-D-galactopyranosyl]oxy]-1-oxopentyl]amino]propyl]amino]- 3-oxopropoxy]methyl]-1,12,19,25-tetraoxo-16-oxa-13,20,24-tr iazanonacos-1-yl]-4-hydroxy-2-hydroxymethylpyrrolidine
ctgagatttgaggctcttcca

SEQ ID NO: 760 - RNA, 21 nt, synthetic construct
  source 1..21: mol_type = other RNA
  modified_base 1: mod_base = OTHER; note = 2'-O-methyluridine-3'-phosphorothioate
  modified_base 2: mod_base = OTHER; note = 2'-O-methylguanosine-3'- phosphorothioate
  modified_base 3: mod_base = OTHER; note = 2'-O-methyladenosine-3'-phosphate
  modified_base 4: mod_base = OTHER; note = 2'-O-methylguanosine-3'-phosphate
  modified_base 5: mod_base = OTHER; note = 2'-O-methyladenosine-3'-phosphate
  modified_base 6: mod_base = OTHER; note = 2'-O-hexadecyl-uridine-3'-phosphate
  modified_base 7: mod_base = OTHER; note = 2'-fluorouridine-3'-phosphate
  modified_base 8: mod_base = OTHER; note = 2'-O-methyluridine-3'-phosphate
  modified_base 9: mod_base = OTHER; note = 2'-fluoroguanosine-3'-phosphate
  modified_base 10: mod_base = OTHER; note = 2'-fluoroadenosine-3'-phosphate
  modified_base 11: mod_base = OTHER; note = 2'-fluoroguanosine-3'-phosphate
  modified_base 12: mod_base = OTHER; note = 2'-O-methylguanosine-3'-phosphate
  modified_base 13: mod_base = OTHER; note = 2'-O-methylcytidine-3'-phosphate
  modified_base 14: mod_base = OTHER; note = 2'-O-methyluridine-3'-phosphate
  modified_base 15: mod_base = OTHER; note = 2'-O-methylcytidine-3'-phosphate
  modified_base 16: mod_base = OTHER; note = 2'-O-methyluridine-3'-phosphate
  modified_base 17: mod_base = OTHER; note = 2'-O-methyluridine-3'-phosphate
  modified_base 18: mod_base = OTHER; note = 2'-O-methylcytidine-3'-phosphate
  modified_base 19: mod_base = OTHER; note = 2'-O-methylcytidine-3'-phosphate
  modified_base 20: mod_base = OTHER; note = 2'-O-methyluridine-3'-phosphate
  modified_base 21: mod_base = OTHER; note = 2'-O-methyladenosine-3'-phosphate N-[tris(GalNAc-alkyl)-amidodecanoyl)]-4-hydroxyprolinol Hyp-(GalNAc-alkyl)3 (2S,4R)-1-[29-[[2-(acetylamino)-2-deoxy-beta-D-galactopyran osyl]oxy]-14,14-bis[[3-[[3-[[5-[[2-(acetylamino)-2-deoxy-be ta-D-galactopyranosyl]oxy]-1-oxopentyl]amino]propyl]amino]- 3-oxopropoxy]methyl]-1,12,19,25-tetraoxo-16-oxa-13,20,24-tr iazanonacos-1-yl]-4-hydroxy-2-hydroxymethylpyrrolidine
tgagatttgaggctcttccta

SEQ ID NO: 761 - RNA, 21 nt, synthetic construct
  source 1..21: mol_type = other RNA
  modified_base 1: mod_base = OTHER; note = 2'-O-methyluridine-3'-phosphorothioate
  modified_base 2: mod_base = OTHER; note = 2'-O-methylguanosine-3'- phosphorothioate
  modified_base 3: mod_base = OTHER; note = 2'-O-methyladenosine-3'-phosphate
  modified_base 4: mod_base = OTHER; note = 2'-O-methylguanosine-3'-phosphate
  modified_base 5: mod_base = OTHER; note = 2'-O-methyladenosine-3'-phosphate
  modified_base 6: mod_base = OTHER; note = 2'-O-hexadecyl-uridine-3'-phosphate
  modified_base 7: mod_base = OTHER; note = 2'-O-methyluridine-3'-phosphate
  modified_base 8: mod_base = OTHER; note = 2'-O-methyluridine-3'-phosphate
  modified_base 9: mod_base = OTHER; note = 2'-fluoroguanosine-3'-phosphate
  modified_base 10: mod_base = OTHER; note = 2'-fluoroadenosine-3'-phosphate
  modified_base 11: mod_base = OTHER; note = 2'-fluoroguanosine-3'-phosphate
  modified_base 12: mod_base = OTHER; note = 2'-O-methylguanosine-3'-phosphate
  modified_base 13: mod_base = OTHER; note = 2'-O-methylcytidine-3'-phosphate
  modified_base 14: mod_base = OTHER; note = 2'-O-methyluridine-3'-phosphate
  modified_base 15: mod_base = OTHER; note = 2'-O-methylcytidine-3'-phosphate
  modified_base 16: mod_base = OTHER; note = 2'-O-methyluridine-3'-phosphate
  modified_base 17: mod_base = OTHER; note = 2'-O-methyluridine-3'-phosphate
  modified_base 18: mod_base = OTHER; note = 2'-O-methylcytidine-3'-phosphate
  modified_base 19: mod_base = OTHER; note = 2'-O-methylcytidine-3'-phosphate
  modified_base 20: mod_base = OTHER; note = 2'-O-methyluridine-3'-phosphate
  modified_base 21: mod_base = OTHER; note = 2'-O-methyladenosine-3'-phosphate N-[tris(GalNAc-alkyl)-amidodecanoyl)]-4-hydroxyprolinol Hyp-(GalNAc-alkyl)3 (2S,4R)-1-[29-[[2-(acetylamino)-2-deoxy-beta-D-galactopyran osyl]oxy]-14,14-bis[[3-[[3-[[5-[[2-(acetylamino)-2-deoxy-be ta-D-galactopyranosyl]oxy]-1-oxopentyl]amino]propyl]amino]- 3-oxopropoxy]methyl]-1,12,19,25-tetraoxo-16-oxa-13,20,24-tr iazanonacos-1-yl]-4-hydroxy-2-hydroxymethylpyrrolidine
tgagatttgaggctcttccta

SEQ ID NO: 762 - RNA, 21 nt, synthetic construct
  source 1..21: mol_type = other RNA
  modified_base 1: mod_base = OTHER; note = 2'-O-methylguanosine-3'- phosphorothioate
  modified_base 2: mod_base = OTHER; note = 2'-O-methyladenosine-3'- phosphorothioate
  modified_base 3: mod_base = OTHER; note = 2'-O-methylguanosine-3'-phosphate
  modified_base 4: mod_base = OTHER; note = 2'-O-methyladenosine-3'-phosphate
  modified_base 5: mod_base = OTHER; note = 2'-O-methyluridine-3'-phosphate
  modified_base 6: mod_base = OTHER; note = 2'-O-hexadecyl-uridine-3'-phosphate
  modified_base 7: mod_base = OTHER; note = 2'-fluorouridine-3'-phosphate
  modified_base 8: mod_base = OTHER; note = 2'-O-methylguanosine-3'-phosphate
  modified_base 9: mod_base = OTHER; note = 2'-fluoroadenosine-3'-phosphate
  modified_base 10: mod_base = OTHER; note = 2'-fluoroguanosine-3'-phosphate
  modified_base 11: mod_base = OTHER; note = 2'-fluoroguanosine-3'-phosphate
  modified_base 12: mod_base = OTHER; note = 2'-O-methylcytidine-3'-phosphate
  modified_base 13: mod_base = OTHER; note = 2'-O-methyluridine-3'-phosphate
  modified_base 14: mod_base = OTHER; note = 2'-O-methylcytidine-3'-phosphate
  modified_base 15: mod_base = OTHER; note = 2'-O-methyluridine-3'-phosphate
  modified_base 16: mod_base = OTHER; note = 2'-O-methyluridine-3'-phosphate
  modified_base 17: mod_base = OTHER; note = 2'-O-methylcytidine-3'-phosphate
  modified_base 18: mod_base = OTHER; note = 2'-O-methylcytidine-3'-phosphate
  modified_base 19: mod_base = OTHER; note = 2'-O-methyluridine-3'-phosphate
  modified_base 20: mod_base = OTHER; note = 2'-O-methyladenosine-3'-phosphate
  modified_base 21: mod_base = OTHER; note = 2'-O-methyladenosine-3'-phosphate N-[tris(GalNAc-alkyl)-amidodecanoyl)]-4-hydroxyprolinol Hyp-(GalNAc-alkyl)3 (2S,4R)-1-[29-[[2-(acetylamino)-2-deoxy-beta-D-galactopyran osyl]oxy]-14,14-bis[[3-[[3-[[5-[[2-(acetylamino)-2-deoxy-be ta-D-galactopyranosyl]oxy]-1-oxopentyl]amino]propyl]amino]- 3-oxopropoxy]methyl]-1,12,19,25-tetraoxo-16-oxa-13,20,24-tr iazanonacos-1-yl]-4-hydroxy-2-hydroxymethylpyrrolidine
gagatttgaggctcttcctaa

SEQ ID NO: 763 - RNA, 21 nt, synthetic construct
  source 1..21: mol_type = other RNA
  modified_base 1: mod_base = OTHER; note = 2'-O-methylguanosine-3'- phosphorothioate
  modified_base 2: mod_base = OTHER; note = 2'-O-methyladenosine-3'- phosphorothioate
  modified_base 3: mod_base = OTHER; note = 2'-O-methylguanosine-3'-phosphate
  modified_base 4: mod_base = OTHER; note = 2'-O-methyladenosine-3'-phosphate
  modified_base 5: mod_base = OTHER; note = 2'-O-methyluridine-3'-phosphate
  modified_base 6: mod_base = OTHER; note = 2'-O-hexadecyl-uridine-3'-phosphate
  modified_base 7: mod_base = OTHER; note = 2'-O-methyluridine-3'-phosphate
  modified_base 8: mod_base = OTHER; note = 2'-O-methylguanosine-3'-phosphate
  modified_base 9: mod_base = OTHER; note = 2'-fluoroadenosine-3'-phosphate
  modified_base 10: mod_base = OTHER; note = 2'-fluoroguanosine-3'-phosphate
  modified_base 11: mod_base = OTHER; note = 2'-fluoroguanosine-3'-phosphate
  modified_base 12: mod_base = OTHER; note = 2'-O-methylcytidine-3'-phosphate
  modified_base 13: mod_base = OTHER; note = 2'-O-methyluridine-3'-phosphate
  modified_base 14: mod_base = OTHER; note = 2'-O-methylcytidine-3'-phosphate
  modified_base 15: mod_base = OTHER; note = 2'-O-methyluridine-3'-phosphate
  modified_base 16: mod_base = OTHER; note = 2'-O-methyluridine-3'-phosphate
  modified_base 17: mod_base = OTHER; note = 2'-O-methylcytidine-3'-phosphate
  modified_base 18: mod_base = OTHER; note = 2'-O-methylcytidine-3'-phosphate
  modified_base 19: mod_base = OTHER; note = 2'-O-methyluridine-3'-phosphate
  modified_base 20: mod_base = OTHER; note = 2'-O-methyladenosine-3'-phosphate
  modified_base 21: mod_base = OTHER; note = 2'-O-methyladenosine-3'-phosphate N-[tris(GalNAc-alkyl)-amidodecanoyl)]-4-hydroxyprolinol Hyp-(GalNAc-alkyl)3 (2S,4R)-1-[29-[[2-(acetylamino)-2-deoxy-beta-D-galactopyran osyl]oxy]-14,14-bis[[3-[[3-[[5-[[2-(acetylamino)-2-deoxy-be ta-D-galactopyranosyl]oxy]-1-oxopentyl]amino]propyl]amino]- 3-oxopropoxy]methyl]-1,12,19,25-tetraoxo-16-oxa-13,20,24-tr iazanonacos-1-yl]-4-hydroxy-2-hydroxymethylpyrrolidine
gagatttgaggctcttcctaa

SEQ ID NO: 764 - RNA, 21 nt, synthetic construct
  source 1..21: mol_type = other RNA
  modified_base 1: mod_base = OTHER; note = 2'-O-methyladenosine-3'- phosphorothioate
  modified_base 2: mod_base = OTHER; note = 2'-O-methylguanosine-3'- phosphorothioate
  modified_base 3: mod_base = OTHER; note = 2'-O-methyladenosine-3'-phosphate
  modified_base 4: mod_base = OTHER; note = 2'-O-methyluridine-3'-phosphate
  modified_base 5: mod_base = OTHER; note = 2'-O-methyluridine-3'-phosphate
  modified_base 6: mod_base = OTHER; note = 2'-O-hexadecyl-uridine-3'-phosphate
  modified_base 7: mod_base = OTHER; note = 2'-fluoroguanosine-3'-phosphate
  modified_base 8: mod_base = OTHER; note = 2'-O-methyladenosine-3'-phosphate
  modified_base 9: mod_base = OTHER; note = 2'-fluoroguanosine-3'-phosphate
  modified_base 10: mod_base = OTHER; note = 2'-fluoroguanosine-3'-phosphate
  modified_base 11: mod_base = OTHER; note = 2'-fluorocytidine-3'-phosphate
  modified_base 12: mod_base = OTHER; note = 2'-O-methyluridine-3'-phosphate
  modified_base 13: mod_base = OTHER; note = 2'-O-methylcytidine-3'-phosphate
  modified_base 14: mod_base = OTHER; note = 2'-O-methyluridine-3'-phosphate
  modified_base 15: mod_base = OTHER; note = 2'-O-methyluridine-3'-phosphate
  modified_base 16: mod_base = OTHER; note = 2'-O-methylcytidine-3'-phosphate
  modified_base 17: mod_base = OTHER; note = 2'-O-methylcytidine-3'-phosphate
  modified_base 18: mod_base = OTHER; note = 2'-O-methyluridine-3'-phosphate
  modified_base 19: mod_base = OTHER; note = 2'-O-methyladenosine-3'-phosphate
  modified_base 20: mod_base = OTHER; note = 2'-O-methylcytidine-3'-phosphate
  modified_base 21: mod_base = OTHER; note = 2'-O-methyladenosine-3'-phosphate N-[tris(GalNAc-alkyl)-amidodecanoyl)]-4-hydroxyprolinol Hyp-(GalNAc-alkyl)3 (2S,4R)-1-[29-[[2-(acetylamino)-2-deoxy-beta-D-galactopyran osyl]oxy]-14,14-bis[[3-[[3-[[5-[[2-(acetylamino)-2-deoxy-be ta-D-galactopyranosyl]oxy]-1-oxopentyl]amino]propyl]amino]- 3-oxopropoxy]methyl]-1,12,19,25-tetraoxo-16-oxa-13,20,24-tr iazanonacos-1-yl]-4-hydroxy-2-hydroxymethylpyrrolidine
agatttgaggctcttcctaca

SEQ ID NO: 765 - RNA, 21 nt, synthetic construct
  source 1..21: mol_type = other RNA
  modified_base 1: mod_base = OTHER; note = 2'-O-methyluridine-3'-phosphorothioate
  modified_base 2: mod_base = OTHER; note = 2'-O-methyluridine-3'-phosphorothioate
  modified_base 3: mod_base = OTHER; note = 2'-O-methyluridine-3'-phosphate
  modified_base 4: mod_base = OTHER; note = 2'-O-methylguanosine-3'-phosphate
  modified_base 5: mod_base = OTHER; note = 2'-O-methyladenosine-3'-phosphate
  modified_base 6: mod_base = OTHER; note = 2'-O-hexadecyl-guanosine-3'-phosphate
  modified_base 7: mod_base = OTHER; note = 2'-fluoroguanosine-3'-phosphate
  modified_base 8: mod_base = OTHER; note = 2'-O-methylcytidine-3'-phosphate
  modified_base 9: mod_base = OTHER; note = 2'-fluorouridine-3'-phosphate
  modified_base 10: mod_base = OTHER; note = 2'-fluorocytidine-3'-phosphate
  modified_base 11: mod_base = OTHER; note = 2'-fluorouridine-3'-phosphate
  modified_base 12: mod_base = OTHER; note = 2'-O-methyluridine-3'-phosphate
  modified_base 13: mod_base = OTHER; note = 2'-O-methylcytidine-3'-phosphate
  modified_base 14: mod_base = OTHER; note = 2'-O-methylcytidine-3'-phosphate
  modified_base 15: mod_base = OTHER; note = 2'-O-methyluridine-3'-phosphate
  modified_base 16: mod_base = OTHER; note = 2'-O-methyladenosine-3'-phosphate
  modified_base 17: mod_base = OTHER; note = 2'-O-methylcytidine-3'-phosphate
  modified_base 18: mod_base = OTHER; note = 2'-O-methyladenosine-3'-phosphate
  modified_base 19: mod_base = OTHER; note = 2'-O-methyluridine-3'-phosphate
  modified_base 20: mod_base = OTHER; note = 2'-O-methyluridine-3'-phosphate
  modified_base 21: mod_base = OTHER; note = 2'-O-methyladenosine-3'-phosphate N-[tris(GalNAc-alkyl)-amidodecanoyl)]-4-hydroxyprolinol Hyp-(GalNAc-alkyl)3 (2S,4R)-1-[29-[[2-(acetylamino)-2-deoxy-beta-D-galactopyran osyl]oxy]-14,14-bis[[3-[[3-[[5-[[2-(acetylamino)-2-deoxy-be ta-D-galactopyranosyl]oxy]-1-oxopentyl]amino]propyl]amino]- 3-oxopropoxy]methyl]-1,12,19,25-tetraoxo-16-oxa-13,20,24-tr iazanonacos-1-yl]-4-hydroxy-2-hydroxymethylpyrrolidine
tttgaggctcttcctacatta

SEQ ID NO: 766 - RNA, 21 nt, synthetic construct
  source 1..21: mol_type = other RNA
  modified_base 1: mod_base = OTHER; note = 2'-O-methyluridine-3'-phosphorothioate
  modified_base 2: mod_base = OTHER; note = 2'-O-methylguanosine-3'- phosphorothioate
  modified_base 3: mod_base = OTHER; note = 2'-O-methyladenosine-3'-phosphate
  modified_base 4: mod_base = OTHER; note = 2'-O-methylguanosine-3'-phosphate
  modified_base 5: mod_base = OTHER; note = 2'-O-methylguanosine-3'-phosphate
  modified_base 6: mod_base = OTHER; note = 2'-O-hexadecyl-cytidine-3'-phosphate
  modified_base 7: mod_base = OTHER; note = 2'-fluorouridine-3'-phosphate
  modified_base 8: mod_base = OTHER; note = 2'-O-methylcytidine-3'-phosphate
  modified_base 9: mod_base = OTHER; note = 2'-fluorouridine-3'-phosphate
  modified_base 10: mod_base = OTHER; note = 2'-fluorouridine-3'-phosphate
  modified_base 11: mod_base = OTHER; note = 2'-fluorocytidine-3'-phosphate
  modified_base 12: mod_base = OTHER; note = 2'-O-methylcytidine-3'-phosphate
  modified_base 13: mod_base = OTHER; note = 2'-O-methyluridine-3'-phosphate
  modified_base 14: mod_base = OTHER; note = 2'-O-methyladenosine-3'-phosphate
  modified_base 15: mod_base = OTHER; note = 2'-O-methylcytidine-3'-phosphate
  modified_base 16: mod_base = OTHER; note = 2'-O-methyladenosine-3'-phosphate
  modified_base 17: mod_base = OTHER; note = 2'-O-methyluridine-3'-phosphate
  modified_base 18: mod_base = OTHER; note = 2'-O-methyluridine-3'-phosphate
  modified_base 19: mod_base = OTHER; note = 2'-O-methylguanosine-3'-phosphate
  modified_base 20: mod_base = OTHER; note = 2'-O-methyluridine-3'-phosphate
  modified_base 21: mod_base = OTHER; note = 2'-O-methyladenosine-3'-phosphate N-[tris(GalNAc-alkyl)-amidodecanoyl)]-4-hydroxyprolinol Hyp-(GalNAc-alkyl)3 (2S,4R)-1-[29-[[2-(acetylamino)-2-deoxy-beta-D-galactopyran osyl]oxy]-14,14-bis[[3-[[3-[[5-[[2-(acetylamino)-2-deoxy-be ta-D-galactopyranosyl]oxy]-1-oxopentyl]amino]propyl]amino]- 3-oxopropoxy]methyl]-1,12,19,25-tetraoxo-16-oxa-13,20,24-tr iazanonacos-1-yl]-4-hydroxy-2-hydroxymethylpyrrolidine
tgaggctcttcctacattgta

SEQ ID NO: 767 - RNA, 21 nt, synthetic construct
  source 1..21: mol_type = other RNA
  modified_base 1: mod_base = OTHER; note = 2'-O-methyluridine-3'-phosphorothioate
  modified_base 2: mod_base = OTHER; note = 2'-O-methylguanosine-3'- phosphorothioate
  modified_base 3: mod_base = OTHER; note = 2'-O-methyladenosine-3'-phosphate
  modified_base 4: mod_base = OTHER; note = 2'-O-methylguanosine-3'-phosphate
  modified_base 5: mod_base = OTHER; note = 2'-O-methylguanosine-3'-phosphate
  modified_base 6: mod_base = OTHER; note = 2'-O-hexadecyl-cytidine-3'-phosphate
  modified_base 7: mod_base = OTHER; note = 2'-O-methyluridine-3'-phosphate
  modified_base 8: mod_base = OTHER; note = 2'-O-methylcytidine-3'-phosphate
  modified_base 9: mod_base = OTHER; note = 2'-fluorouridine-3'-phosphate
  modified_base 10: mod_base = OTHER; note = 2'-fluorouridine-3'-phosphate
  modified_base 11: mod_base = OTHER; note = 2'-fluorocytidine-3'-phosphate
  modified_base 12: mod_base = OTHER; note = 2'-O-methylcytidine-3'-phosphate
  modified_base 13: mod_base = OTHER; note = 2'-O-methyluridine-3'-phosphate
  modified_base 14: mod_base = OTHER; note = 2'-O-methyladenosine-3'-phosphate
  modified_base 15: mod_base = OTHER; note = 2'-O-methylcytidine-3'-phosphate
  modified_base 16: mod_base = OTHER; note = 2'-O-methyladenosine-3'-phosphate
  modified_base 17: mod_base = OTHER; note = 2'-O-methyluridine-3'-phosphate
  modified_base 18: mod_base = OTHER; note = 2'-O-methyluridine-3'-phosphate
  modified_base 19: mod_base = OTHER; note = 2'-O-methylguanosine-3'-phosphate
  modified_base 20: mod_base = OTHER; note = 2'-O-methyluridine-3'-phosphate
  modified_base 21: mod_base = OTHER; note = 2'-O-methyladenosine-3'-phosphate N-[tris(GalNAc-alkyl)-amidodecanoyl)]-4-hydroxyprolinol Hyp-(GalNAc-alkyl)3 (2S,4R)-1-[29-[[2-(acetylamino)-2-deoxy-beta-D-galactopyran osyl]oxy]-14,14-bis[[3-[[3-[[5-[[2-(acetylamino)-2-deoxy-be ta-D-galactopyranosyl]oxy]-1-oxopentyl]amino]propyl]amino]- 3-oxopropoxy]methyl]-1,12,19,25-tetraoxo-16-oxa-13,20,24-tr iazanonacos-1-yl]-4-hydroxy-2-hydroxymethylpyrrolidine
tgaggctcttcctacattgta

SEQ ID NO: 768 - RNA, 21 nt, synthetic construct
  source 1..21: mol_type = other RNA
  modified_base 1: mod_base = OTHER; note = 2'-O-methylguanosine-3'- phosphorothioate
  modified_base 2: mod_base = OTHER; note = 2'-O-methyladenosine-3'- phosphorothioate
  modified_base 3: mod_base = OTHER; note = 2'-O-methylguanosine-3'-phosphate
  modified_base 4: mod_base = OTHER; note = 2'-O-methylguanosine-3'-phosphate
  modified_base 5: mod_base = OTHER; note = 2'-O-methylcytidine-3'-phosphate
  modified_base 6: mod_base = OTHER; note = 2'-O-hexadecyl-uridine-3'-phosphate
  modified_base 7: mod_base = OTHER; note = 2'-fluorocytidine-3'-phosphate
  modified_base 8: mod_base = OTHER; note = 2'-O-methyluridine-3'-phosphate
  modified_base 9: mod_base = OTHER; note = 2'-fluorouridine-3'-phosphate
  modified_base 10: mod_base = OTHER; note = 2'-fluorocytidine-3'-phosphate
  modified_base 11: mod_base = OTHER; note = 2'-fluorocytidine-3'-phosphate
  modified_base 12: mod_base = OTHER; note = 2'-O-methyluridine-3'-phosphate
  modified_base 13: mod_base = OTHER; note = 2'-O-methyladenosine-3'-phosphate
  modified_base 14: mod_base = OTHER; note = 2'-O-methylcytidine-3'-phosphate
  modified_base 15: mod_base = OTHER; note = 2'-O-methyladenosine-3'-phosphate
  modified_base 16: mod_base = OTHER; note = 2'-O-methyluridine-3'-phosphate
  modified_base 17: mod_base = OTHER; note = 2'-O-methyluridine-3'-phosphate
  modified_base 18: mod_base = OTHER; note = 2'-O-methylguanosine-3'-phosphate
  modified_base 19: mod_base = OTHER; note = 2'-O-methyluridine-3'-phosphate
  modified_base 20: mod_base = OTHER; note = 2'-O-methylcytidine-3'-phosphate
  modified_base 21: mod_base = OTHER; note = 2'-O-methyladenosine-3'-phosphate N-[tris(GalNAc-alkyl)-amidodecanoyl)]-4-hydroxyprolinol Hyp-(GalNAc-alkyl)3 (2S,4R)-1-[29-[[2-(acetylamino)-2-deoxy-beta-D-galactopyran osyl]oxy]-14,14-bis[[3-[[3-[[5-[[2-(acetylamino)-2-deoxy-be ta-D-galactopyranosyl]oxy]-1-oxopentyl]amino]propyl]amino]- 3-oxopropoxy]methyl]-1,12,19,25-tetraoxo-16-oxa-13,20,24-tr iazanonacos-1-yl]-4-hydroxy-2-hydroxymethylpyrrolidine
gaggctcttcctacattgtca

SEQ ID NO: 769 - RNA, 21 nt, synthetic construct
  source 1..21: mol_type = other RNA
  modified_base 1: mod_base = OTHER; note = 2'-O-methylguanosine-3'- phosphorothioate
  modified_base 2: mod_base = OTHER; note = 2'-O-methyladenosine-3'- phosphorothioate
  modified_base 3: mod_base = OTHER; note = 2'-O-methylguanosine-3'-phosphate
  modified_base 4: mod_base = OTHER; note = 2'-O-methylguanosine-3'-phosphate
  modified_base 5: mod_base = OTHER; note = 2'-O-methylcytidine-3'-phosphate
  modified_base 6: mod_base = OTHER; note = 2'-O-hexadecyl-uridine-3'-phosphate
  modified_base 7: mod_base = OTHER; note = 2'-O-methylcytidine-3'-phosphate
  modified_base 8: mod_base = OTHER; note = 2'-O-methyluridine-3'-phosphate
  modified_base 9: mod_base = OTHER; note = 2'-fluorouridine-3'-phosphate
  modified_base 10: mod_base = OTHER; note = 2'-fluorocytidine-3'-phosphate
  modified_base 11: mod_base = OTHER; note = 2'-fluorocytidine-3'-phosphate
  modified_base 12: mod_base = OTHER; note = 2'-O-methyluridine-3'-phosphate
  modified_base 13: mod_base = OTHER; note = 2'-O-methyladenosine-3'-phosphate
  modified_base 14: mod_base = OTHER; note = 2'-O-methylcytidine-3'-phosphate
  modified_base 15: mod_base = OTHER; note = 2'-O-methyladenosine-3'-phosphate
  modified_base 16: mod_base = OTHER; note = 2'-O-methyluridine-3'-phosphate
  modified_base 17: mod_base = OTHER; note = 2'-O-methyluridine-3'-phosphate
  modified_base 18: mod_base = OTHER; note = 2'-O-methylguanosine-3'-phosphate
  modified_base 19: mod_base = OTHER; note = 2'-O-methyluridine-3'-phosphate
  modified_base 20: mod_base = OTHER; note = 2'-O-methylcytidine-3'-phosphate
  modified_base 21: mod_base = OTHER; note = 2'-O-methyladenosine-3'-phosphate N-[tris(GalNAc-alkyl)-amidodecanoyl)]-4-hydroxyprolinol Hyp-(GalNAc-alkyl)3 (2S,4R)-1-[29-[[2-(acetylamino)-2-deoxy-beta-D-galactopyran osyl]oxy]-14,14-bis[[3-[[3-[[5-[[2-(acetylamino)-2-deoxy-be ta-D-galactopyranosyl]oxy]-1-oxopentyl]amino]propyl]amino]- 3-oxopropoxy]methyl]-1,12,19,25-tetraoxo-16-oxa-13,20,24-tr iazanonacos-1-yl]-4-hydroxy-2-hydroxymethylpyrrolidine
gaggctcttcctacattgtca

SEQ ID NO: 770 - RNA, 21 nt, synthetic construct
  source 1..21: mol_type = other RNA
  modified_base 1: mod_base = OTHER; note = 2'-O-methyladenosine-3'- phosphorothioate
  modified_base 2: mod_base = OTHER; note = 2'-O-methylguanosine-3'- phosphorothioate
  modified_base 3: mod_base = OTHER; note = 2'-O-methylguanosine-3'-phosphate
  modified_base 4: mod_base = OTHER; note = 2'-O-methylcytidine-3'-phosphate
  modified_base 5: mod_base = OTHER; note = 2'-O-methyluridine-3'-phosphate
  modified_base 6: mod_base = OTHER; note = 2'-O-hexadecyl-cytidine-3'-phosphate
  modified_base 7: mod_base = OTHER; note = 2'-fluorouridine-3'-phosphate
  modified_base 8: mod_base = OTHER; note = 2'-O-methyluridine-3'-phosphate
  modified_base 9: mod_base = OTHER; note = 2'-fluorocytidine-3'-phosphate
  modified_base 10: mod_base = OTHER; note = 2'-fluorocytidine-3'-phosphate
  modified_base 11: mod_base = OTHER; note = 2'-fluorouridine-3'-phosphate
  modified_base 12: mod_base = OTHER; note = 2'-O-methyladenosine-3'-phosphate
  modified_base 13: mod_base = OTHER; note = 2'-O-methylcytidine-3'-phosphate
  modified_base 14: mod_base = OTHER; note = 2'-O-methyladenosine-3'-phosphate
  modified_base 15: mod_base = OTHER; note = 2'-O-methyluridine-3'-phosphate
  modified_base 16: mod_base = OTHER; note = 2'-O-methyluridine-3'-phosphate
  modified_base 17: mod_base = OTHER; note = 2'-O-methylguanosine-3'-phosphate
  modified_base 18: mod_base = OTHER; note = 2'-O-methyluridine-3'-phosphate
  modified_base 19: mod_base = OTHER; note = 2'-O-methylcytidine-3'-phosphate
  modified_base 20: mod_base = OTHER; note = 2'-O-methyladenosine-3'-phosphate
  modified_base 21: mod_base = OTHER; note = 2'-O-methyladenosine-3'-phosphate N-[tris(GalNAc-alkyl)-amidodecanoyl)]-4-hydroxyprolinol Hyp-(GalNAc-alkyl)3 (2S,4R)-1-[29-[[2-(acetylamino)-2-deoxy-beta-D-galactopyran osyl]oxy]-14,14-bis[[3-[[3-[[5-[[2-(acetylamino)-2-deoxy-be ta-D-galactopyranosyl]oxy]-1-oxopentyl]amino]propyl]amino]- 3-oxopropoxy]methyl]-1,12,19,25-tetraoxo-16-oxa-13,20,24-tr iazanonacos-1-yl]-4-hydroxy-2-hydroxymethylpyrrolidine
aggctcttcctacattgtcaa

SEQ ID NO: 771 - RNA, 21 nt, synthetic construct
  source 1..21: mol_type = other RNA
  modified_base 1: mod_base = OTHER; note = 2'-O-methyladenosine-3'- phosphorothioate
  modified_base 2: mod_base = OTHER; note = 2'-O-methylguanosine-3'- phosphorothioate
  modified_base 3: mod_base = OTHER; note = 2'-O-methylguanosine-3'-phosphate
  modified_base 4: mod_base = OTHER; note = 2'-O-methylcytidine-3'-phosphate
  modified_base 5: mod_base = OTHER; note = 2'-O-methyluridine-3'-phosphate
  modified_base 6: mod_base = OTHER; note = 2'-O-hexadecyl-cytidine-3'-phosphate
  modified_base 7: mod_base = OTHER; note = 2'-O-methyluridine-3'-phosphate
  modified_base 8: mod_base = OTHER; note = 2'-O-methyluridine-3'-phosphate
  modified_base 9: mod_base = OTHER; note = 2'-fluorocytidine-3'-phosphate
  modified_base 10: mod_base = OTHER; note = 2'-fluorocytidine-3'-phosphate
  modified_base 11: mod_base = OTHER; note = 2'-fluorouridine-3'-phosphate
  modified_base 12: mod_base = OTHER; note = 2'-O-methyladenosine-3'-phosphate
  modified_base 13: mod_base = OTHER; note = 2'-O-methylcytidine-3'-phosphate
  modified_base 14: mod_base = OTHER; note = 2'-O-methyladenosine-3'-phosphate
  modified_base 15: mod_base = OTHER; note = 2'-O-methyluridine-3'-phosphate
  modified_base 16: mod_base = OTHER; note = 2'-O-methyluridine-3'-phosphate
  modified_base 17: mod_base = OTHER; note = 2'-O-methylguanosine-3'-phosphate
  modified_base 18: mod_base = OTHER; note = 2'-O-methyluridine-3'-phosphate
  modified_base 19: mod_base = OTHER; note = 2'-O-methylcytidine-3'-phosphate
  modified_base 20: mod_base = OTHER; note = 2'-O-methyladenosine-3'-phosphate
  modified_base 21: mod_base = OTHER; note = 2'-O-methyladenosine-3'-phosphate N-[tris(GalNAc-alkyl)-amidodecanoyl)]-4-hydroxyprolinol Hyp-(GalNAc-alkyl)3 (2S,4R)-1-[29-[[2-(acetylamino)-2-deoxy-beta-D-galactopyran osyl]oxy]-14,14-bis[[3-[[3-[[5-[[2-(acetylamino)-2-deoxy-be ta-D-galactopyranosyl]oxy]-1-oxopentyl]amino]propyl]amino]- 3-oxopropoxy]methyl]-1,12,19,25-tetraoxo-16-oxa-13,20,24-tr iazanonacos-1-yl]-4-hydroxy-2-hydroxymethylpyrrolidine
aggctcttcctacattgtcaa

SEQ ID NO: 772 - RNA, 21 nt, synthetic construct
  source 1..21: mol_type = other RNA
  modified_base 1: mod_base = OTHER; note = 2'-O-methylguanosine-3'- phosphorothioate
  modified_base 2: mod_base = OTHER; note = 2'-O-methylguanosine-3'- phosphorothioate
  modified_base 3: mod_base = OTHER; note = 2'-O-methylcytidine-3'-phosphate
  modified_base 4: mod_base = OTHER; note = 2'-O-methyluridine-3'-phosphate
  modified_base 5: mod_base = OTHER; note = 2'-O-methylcytidine-3'-phosphate
  modified_base 6: mod_base = OTHER; note = 2'-O-hexadecyl-uridine-3'-phosphate
  modified_base 7: mod_base = OTHER; note = 2'-fluorouridine-3'-phosphate
  modified_base 8: mod_base = OTHER; note = 2'-O-methylcytidine-3'-phosphate
  modified_base 9: mod_base = OTHER; note = 2'-fluorocytidine-3'-phosphate
  modified_base 10: mod_base = OTHER; note = 2'-fluorouridine-3'-phosphate
  modified_base 11: mod_base = OTHER; note = 2'-fluoroadenosine-3'-phosphate
  modified_base 12: mod_base = OTHER; note = 2'-O-methylcytidine-3'-phosphate
  modified_base 13: mod_base = OTHER; note = 2'-O-methyladenosine-3'-phosphate
  modified_base 14: mod_base = OTHER; note = 2'-O-methyluridine-3'-phosphate
  modified_base 15: mod_base = OTHER; note = 2'-O-methyluridine-3'-phosphate
  modified_base 16: mod_base = OTHER; note = 2'-O-methylguanosine-3'-phosphate
  modified_base 17: mod_base = OTHER; note = 2'-O-methyluridine-3'-phosphate
  modified_base 18: mod_base = OTHER; note = 2'-O-methylcytidine-3'-phosphate
  modified_base 19: mod_base = OTHER; note = 2'-O-methyladenosine-3'-phosphate
  modified_base 20: mod_base = OTHER; note = 2'-O-methylguanosine-3'-phosphate
  modified_base 21: mod_base = OTHER; note = 2'-O-methyladenosine-3'-phosphate N-[tris(GalNAc-alkyl)-amidodecanoyl)]-4-hydroxyprolinol Hyp-(GalNAc-alkyl)3 (2S,4R)-1-[29-[[2-(acetylamino)-2-deoxy-beta-D-galactopyran osyl]oxy]-14,14-bis[[3-[[3-[[5-[[2-(acetylamino)-2-deoxy-be ta-D-galactopyranosyl]oxy]-1-oxopentyl]amino]propyl]amino]- 3-oxopropoxy]methyl]-1,12,19,25-tetraoxo-16-oxa-13,20,24-tr iazanonacos-1-yl]-4-hydroxy-2-hydroxymethylpyrrolidine
ggctcttcctacattgtcaga

SEQ ID NO: 773 - RNA, 21 nt, synthetic construct
  source 1..21: mol_type = other RNA
  modified_base 1: mod_base = OTHER; note = 2'-O-methylguanosine-3'- phosphorothioate
  modified_base 2: mod_base = OTHER; note = 2'-O-methylguanosine-3'- phosphorothioate
  modified_base 3: mod_base = OTHER; note = 2'-O-methylcytidine-3'-phosphate
  modified_base 4: mod_base = OTHER; note = 2'-O-methyluridine-3'-phosphate
  modified_base 5: mod_base = OTHER; note = 2'-O-methylcytidine-3'-phosphate
  modified_base 6: mod_base = OTHER; note = 2'-O-hexadecyl-uridine-3'-phosphate
  modified_base 7: mod_base = OTHER; note = 2'-O-methyluridine-3'-phosphate
  modified_base 8: mod_base = OTHER; note = 2'-O-methylcytidine-3'-phosphate
  modified_base 9: mod_base = OTHER; note = 2'-fluorocytidine-3'-phosphate
  modified_base 10: mod_base = OTHER; note = 2'-fluorouridine-3'-phosphate
  modified_base 11: mod_base = OTHER; note = 2'-fluoroadenosine-3'-phosphate
  modified_base 12: mod_base = OTHER; note = 2'-O-methylcytidine-3'-phosphate
  modified_base 13: mod_base = OTHER; note = 2'-O-methyladenosine-3'-phosphate
  modified_base 14: mod_base = OTHER; note = 2'-O-methyluridine-3'-phosphate
  modified_base 15: mod_base = OTHER; note = 2'-O-methyluridine-3'-phosphate
  modified_base 16: mod_base = OTHER; note = 2'-O-methylguanosine-3'-phosphate
  modified_base 17: mod_base = OTHER; note = 2'-O-methyluridine-3'-phosphate
  modified_base 18: mod_base = OTHER; note = 2'-O-methylcytidine-3'-phosphate
  modified_base 19: mod_base = OTHER; note = 2'-O-methyladenosine-3'-phosphate
  modified_base 20: mod_base = OTHER; note = 2'-O-methylguanosine-3'-phosphate
  modified_base 21: mod_base = OTHER; note = 2'-O-methyladenosine-3'-phosphate N-[tris(GalNAc-alkyl)-amidodecanoyl)]-4-hydroxyprolinol Hyp-(GalNAc-alkyl)3 (2S,4R)-1-[29-[[2-(acetylamino)-2-deoxy-beta-D-galactopyran osyl]oxy]-14,14-bis[[3-[[3-[[5-[[2-(acetylamino)-2-deoxy-be ta-D-galactopyranosyl]oxy]-1-oxopentyl]amino]propyl]amino]- 3-oxopropoxy]methyl]-1,12,19,25-tetraoxo-16-oxa-13,20,24-tr iazanonacos-1-yl]-4-hydroxy-2-hydroxymethylpyrrolidine
ggctcttcctacattgtcaga

SEQ ID NO: 774 - RNA, 21 nt, synthetic construct
  source 1..21: mol_type = other RNA
  modified_base 1: mod_base = OTHER; note = 2'-O-methylguanosine-3'- phosphorothioate
  modified_base 2: mod_base = OTHER; note = 2'-O-methylcytidine-3'- phosphorothioate
  modified_base 3: mod_base = OTHER; note = 2'-O-methyluridine-3'-phosphate
  modified_base 4: mod_base = OTHER; note = 2'-O-methylcytidine-3'-phosphate
  modified_base 5: mod_base = OTHER; note = 2'-O-methyluridine-3'-phosphate
  modified_base 6: mod_base = OTHER; note = 2'-O-hexadecyl-uridine-3'-phosphate
  modified_base 7: mod_base = OTHER; note = 2'-fluorocytidine-3'-phosphate
  modified_base 8: mod_base = OTHER; note = 2'-O-methylcytidine-3'-phosphate
  modified_base 9: mod_base = OTHER; note = 2'-fluorouridine-3'-phosphate
  modified_base 10: mod_base = OTHER; note = 2'-fluoroadenosine-3'-phosphate
  modified_base 11: mod_base = OTHER; note = 2'-fluorocytidine-3'-phosphate
  modified_base 12: mod_base = OTHER; note = 2'-O-methyladenosine-3'-phosphate
  modified_base 13: mod_base = OTHER; note = 2'-O-methyluridine-3'-phosphate
  modified_base 14: mod_base = OTHER; note = 2'-O-methyluridine-3'-phosphate
  modified_base 15: mod_base = OTHER; note = 2'-O-methylguanosine-3'-phosphate
  modified_base 16: mod_base = OTHER; note = 2'-O-methyluridine-3'-phosphate
  modified_base 17: mod_base = OTHER; note = 2'-O-methylcytidine-3'-phosphate
  modified_base 18: mod_base = OTHER; note = 2'-O-methyladenosine-3'-phosphate
  modified_base 19: mod_base = OTHER; note = 2'-O-methylguanosine-3'-phosphate
  modified_base 20: mod_base = OTHER; note = 2'-O-methylguanosine-3'-phosphate
  modified_base 21: mod_base = OTHER; note = 2'-O-methyladenosine-3'-phosphate N-[tris(GalNAc-alkyl)-amidodecanoyl)]-4-hydroxyprolinol Hyp-(GalNAc-alkyl)3 (2S,4R)-1-[29-[[2-(acetylamino)-2-deoxy-beta-D-galactopyran osyl]oxy]-14,14-bis[[3-[[3-[[5-[[2-(acetylamino)-2-deoxy-be ta-D-galactopyranosyl]oxy]-1-oxopentyl]amino]propyl]amino]- 3-oxopropoxy]methyl]-1,12,19,25-tetraoxo-16-oxa-13,20,24-tr iazanonacos-1-yl]-4-hydroxy-2-hydroxymethylpyrrolidine
gctcttcctacattgtcagga

SEQ ID NO: 775 - RNA, 21 nt, synthetic construct
  source 1..21: mol_type = other RNA
  modified_base 1: mod_base = OTHER; note = 2'-O-methylguanosine-3'- phosphorothioate
  modified_base 2: mod_base = OTHER; note = 2'-O-methylcytidine-3'- phosphorothioate
  modified_base 3: mod_base = OTHER; note = 2'-O-methyluridine-3'-phosphate
  modified_base 4: mod_base = OTHER; note = 2'-O-methylcytidine-3'-phosphate
  modified_base 5: mod_base = OTHER; note = 2'-O-methyluridine-3'-phosphate
  modified_base 6: mod_base = OTHER; note = 2'-O-hexadecyl-uridine-3'-phosphate
  modified_base 7: mod_base = OTHER; note = 2'-O-methylcytidine-3'-phosphate
  modified_base 8: mod_base = OTHER; note = 2'-O-methylcytidine-3'-phosphate
  modified_base 9: mod_base = OTHER; note = 2'-fluorouridine-3'-phosphate
  modified_base 10: mod_base = OTHER; note = 2'-fluoroadenosine-3'-phosphate
  modified_base 11: mod_base = OTHER; note = 2'-fluorocytidine-3'-phosphate
  modified_base 12: mod_base = OTHER; note = 2'-O-methyladenosine-3'-phosphate
  modified_base 13: mod_base = OTHER; note = 2'-O-methyluridine-3'-phosphate
  modified_base 14: mod_base = OTHER; note = 2'-O-methyluridine-3'-phosphate
  modified_base 15: mod_base = OTHER; note = 2'-O-methylguanosine-3'-phosphate
  modified_base 16: mod_base = OTHER; note = 2'-O-methyluridine-3'-phosphate
  modified_base 17: mod_base = OTHER; note = 2'-O-methylcytidine-3'-phosphate
  modified_base 18: mod_base = OTHER; note = 2'-O-methyladenosine-3'-phosphate
  modified_base 19: mod_base = OTHER; note = 2'-O-methylguanosine-3'-phosphate
  modified_base 20: mod_base = OTHER; note = 2'-O-methylguanosine-3'-phosphate
  modified_base 21: mod_base = OTHER; note = 2'-O-methyladenosine-3'-phosphate N-[tris(GalNAc-alkyl)-amidodecanoyl)]-4-hydroxyprolinol Hyp-(GalNAc-alkyl)3 (2S,4R)-1-[29-[[2-(acetylamino)-2-deoxy-beta-D-galactopyran osyl]oxy]-14,14-bis[[3-[[3-[[5-[[2-(acetylamino)-2-deoxy-be ta-D-galactopyranosyl]oxy]-1-oxopentyl]amino]propyl]amino]- 3-oxopropoxy]methyl]-1,12,19,25-tetraoxo-16-oxa-13,20,24-tr iazanonacos-1-yl]-4-hydroxy-2-hydroxymethylpyrrolidine
gctcttcctacattgtcagga

SEQ ID NO: 776 - RNA, 21 nt, synthetic construct
  source 1..21: mol_type = other RNA
  modified_base 1: mod_base = OTHER; note = 2'-O-methylcytidine-3'- phosphorothioate
  modified_base 2: mod_base = OTHER; note = 2'-O-methyluridine-3'-phosphorothioate
  modified_base 3: mod_base = OTHER; note = 2'-O-methylcytidine-3'-phosphate
  modified_base 4: mod_base = OTHER; note = 2'-O-methyluridine-3'-phosphate
  modified_base 5: mod_base = OTHER; note = 2'-O-methyluridine-3'-phosphate
  modified_base 6: mod_base = OTHER; note = 2'-O-hexadecyl-cytidine-3'-phosphate
  modified_base 7: mod_base = OTHER; note = 2'-fluorocytidine-3'-phosphate
  modified_base 8: mod_base = OTHER; note = 2'-O-methyluridine-3'-phosphate
  modified_base 9: mod_base = OTHER; note = 2'-fluoroadenosine-3'-phosphate
  modified_base 10: mod_base = OTHER; note = 2'-fluorocytidine-3'-phosphate
  modified_base 11: mod_base = OTHER; note = 2'-fluoroadenosine-3'-phosphate
  modified_base 12: mod_base = OTHER; note = 2'-O-methyluridine-3'-phosphate
  modified_base 13: mod_base = OTHER; note = 2'-O-methyluridine-3'-phosphate
  modified_base 14: mod_base = OTHER; note = 2'-O-methylguanosine-3'-phosphate
  modified_base 15: mod_base = OTHER; note = 2'-O-methyluridine-3'-phosphate
  modified_base 16: mod_base = OTHER; note = 2'-O-methylcytidine-3'-phosphate
  modified_base 17: mod_base = OTHER; note = 2'-O-methyladenosine-3'-phosphate
  modified_base 18: mod_base = OTHER; note = 2'-O-methylguanosine-3'-phosphate
  modified_base 19: mod_base = OTHER; note = 2'-O-methylguanosine-3'-phosphate
  modified_base 20: mod_base = OTHER; note = 2'-O-methyladenosine-3'-phosphate
  modified_base 21: mod_base = OTHER; note = 2'-O-methyladenosine-3'-phosphate N-[tris(GalNAc-alkyl)-amidodecanoyl)]-4-hydroxyprolinol Hyp-(GalNAc-alkyl)3 (2S,4R)-1-[29-[[2-(acetylamino)-2-deoxy-beta-D-galactopyran osyl]oxy]-14,14-bis[[3-[[3-[[5-[[2-(acetylamino)-2-deoxy-be ta-D-galactopyranosyl]oxy]-1-oxopentyl]amino]propyl]amino]- 3-oxopropoxy]methyl]-1,12,19,25-tetraoxo-16-oxa-13,20,24-tr iazanonacos-1-yl]-4-hydroxy-2-hydroxymethylpyrrolidine
ctcttcctacattgtcaggaa

SEQ ID NO: 777 - RNA, 21 nt, synthetic construct
  source 1..21: mol_type = other RNA
  modified_base 1: mod_base = OTHER; note = 2'-O-methylcytidine-3'- phosphorothioate
  modified_base 2: mod_base = OTHER; note = 2'-O-methyluridine-3'-phosphorothioate
  modified_base 3: mod_base = OTHER; note = 2'-O-methyluridine-3'-phosphate
  modified_base 4: mod_base = OTHER; note = 2'-O-methylcytidine-3'-phosphate
  modified_base 5: mod_base = OTHER; note = 2'-O-methylcytidine-3'-phosphate
  modified_base 6: mod_base = OTHER; note = 2'-O-hexadecyl-uridine-3'-phosphate
  modified_base 7: mod_base = OTHER; note = 2'-fluoroadenosine-3'-phosphate
  modified_base 8: mod_base = OTHER; note = 2'-O-methylcytidine-3'-phosphate
  modified_base 9: mod_base = OTHER; note = 2'-fluoroadenosine-3'-phosphate
  modified_base 10: mod_base = OTHER; note = 2'-fluorouridine-3'-phosphate
  modified_base 11: mod_base = OTHER; note = 2'-fluorouridine-3'-phosphate
  modified_base 12: mod_base = OTHER; note = 2'-O-methylguanosine-3'-phosphate
  modified_base 13: mod_base = OTHER; note = 2'-O-methyluridine-3'-phosphate
  modified_base 14: mod_base = OTHER; note = 2'-O-methylcytidine-3'-phosphate
  modified_base 15: mod_base = OTHER; note = 2'-O-methyladenosine-3'-phosphate
  modified_base 16: mod_base = OTHER; note = 2'-O-methylguanosine-3'-phosphate
  modified_base 17: mod_base = OTHER; note = 2'-O-methylguanosine-3'-phosphate
  modified_base 18: mod_base = OTHER; note = 2'-O-methyladenosine-3'-phosphate
  modified_base 19: mod_base = OTHER; note = 2'-O-methylcytidine-3'-phosphate
  modified_base 20: mod_base = OTHER; note = 2'-O-methyladenosine-3'-phosphate
  modified_base 21: mod_base = OTHER; note = 2'-O-methyladenosine-3'-phosphate N-[tris(GalNAc-alkyl)-amidodecanoyl)]-4-hydroxyprolinol Hyp-(GalNAc-alkyl)3 (2S,4R)-1-[29-[[2-(acetylamino)-2-deoxy-beta-D-galactopyran osyl]oxy]-14,14-bis[[3-[[3-[[5-[[2-(acetylamino)-2-deoxy-be ta-D-galactopyranosyl]oxy]-1-oxopentyl]amino]propyl]amino]- 3-oxopropoxy]methyl]-1,12,19,25-tetraoxo-16-oxa-13,20,24-tr iazanonacos-1-yl]-4-hydroxy-2-hydroxymethylpyrrolidine
cttcctacattgtcaggacaa

SEQ ID NO: 778 - RNA, 21 nt, synthetic construct
  source 1..21: mol_type = other RNA
  modified_base 1: mod_base = OTHER; note = 2'-O-methyluridine-3'-phosphorothioate
  modified_base 2: mod_base = OTHER; note = 2'-O-methyladenosine-3'- phosphorothioate
  modified_base 3: mod_base = OTHER; note = 2'-O-methylcytidine-3'-phosphate
  modified_base 4: mod_base = OTHER; note = 2'-O-methyladenosine-3'-phosphate
  modified_base 5: mod_base = OTHER; note = 2'-O-methyluridine-3'-phosphate
  modified_base 6: mod_base = OTHER; note = 2'-O-hexadecyl-uridine-3'-phosphate
  modified_base 7: mod_base = OTHER; note = 2'-fluoroguanosine-3'-phosphate
  modified_base 8: mod_base = OTHER; note = 2'-O-methyluridine-3'-phosphate
  modified_base 9: mod_base = OTHER; note = 2'-fluorocytidine-3'-phosphate
  modified_base 10: mod_base = OTHER; note = 2'-fluoroadenosine-3'-phosphate
  modified_base 11: mod_base = OTHER; note = 2'-fluoroguanosine-3'-phosphate
  modified_base 12: mod_base = OTHER; note = 2'-O-methylguanosine-3'-phosphate
  modified_base 13: mod_base = OTHER; note = 2'-O-methyladenosine-3'-phosphate
  modified_base 14: mod_base = OTHER; note = 2'-O-methylcytidine-3'-phosphate
  modified_base 15: mod_base = OTHER; note = 2'-O-methyladenosine-3'-phosphate
  modified_base 16: mod_base = OTHER; note = 2'-O-methyluridine-3'-phosphate
  modified_base 17: mod_base = OTHER; note = 2'-O-methyluridine-3'-phosphate
  modified_base 18: mod_base = OTHER; note = 2'-O-methyluridine-3'-phosphate
  modified_base 19: mod_base = OTHER; note = 2'-O-methylcytidine-3'-phosphate
  modified_base 20: mod_base = OTHER; note = 2'-O-methyladenosine-3'-phosphate
  modified_base 21: mod_base = OTHER; note = 2'-O-methyladenosine-3'-phosphate N-[tris(GalNAc-alkyl)-amidodecanoyl)]-4-hydroxyprolinol Hyp-(GalNAc-alkyl)3 (2S,4R)-1-[29-[[2-(acetylamino)-2-deoxy-beta-D-galactopyran osyl]oxy]-14,14-bis[[3-[[3-[[5-[[2-(acetylamino)-2-deoxy-be ta-D-galactopyranosyl]oxy]-1-oxopentyl]amino]propyl]amino]- 3-oxopropoxy]methyl]-1,12,19,25-tetraoxo-16-oxa-13,20,24-tr iazanonacos-1-yl]-4-hydroxy-2-hydroxymethylpyrrolidine
tacattgtcaggacatttcaa

SEQ ID NO: 779 - RNA, 21 nt, synthetic construct
  source 1..21: mol_type = other RNA
  modified_base 1: mod_base = OTHER; note = 2'-O-methyluridine-3'-phosphorothioate
  modified_base 2: mod_base = OTHER; note = 2'-O-methyladenosine-3'- phosphorothioate
  modified_base 3: mod_base = OTHER; note = 2'-O-methylcytidine-3'-phosphate
  modified_base 4: mod_base = OTHER; note = 2'-O-methyladenosine-3'-phosphate
  modified_base 5: mod_base = OTHER; note = 2'-O-methyluridine-3'-phosphate
  modified_base 6: mod_base = OTHER; note = 2'-O-hexadecyl-uridine-3'-phosphate
  modified_base 7: mod_base = OTHER; note = 2'-O-methylguanosine-3'-phosphate
  modified_base 8: mod_base = OTHER; note = 2'-O-methyluridine-3'-phosphate
  modified_base 9: mod_base = OTHER; note = 2'-fluorocytidine-3'-phosphate
  modified_base 10: mod_base = OTHER; note = 2'-fluoroadenosine-3'-phosphate
  modified_base 11: mod_base = OTHER; note = 2'-fluoroguanosine-3'-phosphate
  modified_base 12: mod_base = OTHER; note = 2'-O-methylguanosine-3'-phosphate
  modified_base 13: mod_base = OTHER; note = 2'-O-methyladenosine-3'-phosphate
  modified_base 14: mod_base = OTHER; note = 2'-O-methylcytidine-3'-phosphate
  modified_base 15: mod_base = OTHER; note = 2'-O-methyladenosine-3'-phosphate
  modified_base 16: mod_base = OTHER; note = 2'-O-methyluridine-3'-phosphate
  modified_base 17: mod_base = OTHER; note = 2'-O-methyluridine-3'-phosphate
  modified_base 18: mod_base = OTHER; note = 2'-O-methyluridine-3'-phosphate
  modified_base 19: mod_base = OTHER; note = 2'-O-methylcytidine-3'-phosphate
  modified_base 20: mod_base = OTHER; note = 2'-O-methyladenosine-3'-phosphate
  modified_base 21: mod_base = OTHER; note = 2'-O-methyladenosine-3'-phosphate N-[tris(GalNAc-alkyl)-amidodecanoyl)]-4-hydroxyprolinol Hyp-(GalNAc-alkyl)3 (2S,4R)-1-[29-[[2-(acetylamino)-2-deoxy-beta-D-galactopyran osyl]oxy]-14,14-bis[[3-[[3-[[5-[[2-(acetylamino)-2-deoxy-be ta-D-galactopyranosyl]oxy]-1-oxopentyl]amino]propyl]amino]- 3-oxopropoxy]methyl]-1,12,19,25-tetraoxo-16-oxa-13,20,24-tr iazanonacos-1-yl]-4-hydroxy-2-hydroxymethylpyrrolidine
tacattgtcaggacatttcaa

SEQ ID NO: 780 - RNA, 21 nt, synthetic construct
  source 1..21: mol_type = other RNA
  modified_base 1: mod_base = OTHER; note = 2'-O-methyladenosine-3'- phosphorothioate
  modified_base 2: mod_base = OTHER; note = 2'-O-methylcytidine-3'- phosphorothioate
  modified_base 3: mod_base = OTHER; note = 2'-O-methyladenosine-3'-phosphate
  modified_base 4: mod_base = OTHER; note = 2'-O-methyluridine-3'-phosphate
  modified_base 5: mod_base = OTHER; note = 2'-O-methyluridine-3'-phosphate
  modified_base 6: mod_base = OTHER; note = 2'-O-hexadecyl-guanosine-3'-phosphate
  modified_base 7: mod_base = OTHER; note = 2'-fluorouridine-3'-phosphate
  modified_base 8: mod_base = OTHER; note = 2'-O-methylcytidine-3'-phosphate
  modified_base 9: mod_base = OTHER; note = 2'-fluoroadenosine-3'-phosphate
  modified_base 10: mod_base = OTHER; note = 2'-fluoroguanosine-3'-phosphate
  modified_base 11: mod_base = OTHER; note = 2'-fluoroguanosine-3'-phosphate
  modified_base 12: mod_base = OTHER; note = 2'-O-methyladenosine-3'-phosphate
  modified_base 13: mod_base = OTHER; note = 2'-O-methylcytidine-3'-phosphate
  modified_base 14: mod_base = OTHER; note = 2'-O-methyladenosine-3'-phosphate
  modified_base 15: mod_base = OTHER; note = 2'-O-methyluridine-3'-phosphate
  modified_base 16: mod_base = OTHER; note = 2'-O-methyluridine-3'-phosphate
  modified_base 17: mod_base = OTHER; note = 2'-O-methyluridine-3'-phosphate
  modified_base 18: mod_base = OTHER; note = 2'-O-methylcytidine-3'-phosphate
  modified_base 19: mod_base = OTHER; note = 2'-O-methyladenosine-3'-phosphate
  modified_base 20: mod_base = OTHER; note = 2'-O-methyluridine-3'-phosphate
  modified_base 21: mod_base = OTHER; note = 2'-O-methyladenosine-3'-phosphate N-[tris(GalNAc-alkyl)-amidodecanoyl)]-4-hydroxyprolinol Hyp-(GalNAc-alkyl)3 (2S,4R)-1-[29-[[2-(acetylamino)-2-deoxy-beta-D-galactopyran osyl]oxy]-14,14-bis[[3-[[3-[[5-[[2-(acetylamino)-2-deoxy-be ta-D-galactopyranosyl]oxy]-1-oxopentyl]amino]propyl]amino]- 3-oxopropoxy]methyl]-1,12,19,25-tetraoxo-16-oxa-13,20,24-tr iazanonacos-1-yl]-4-hydroxy-2-hydroxymethylpyrrolidine
acattgtcaggacatttcata

SEQ ID NO: 781 - RNA, 21 nt, synthetic construct
  source 1..21: mol_type = other RNA
  modified_base 1: mod_base = OTHER; note = 2'-O-methyladenosine-3'- phosphorothioate
  modified_base 2: mod_base = OTHER; note = 2'-O-methylcytidine-3'- phosphorothioate
  modified_base 3: mod_base = OTHER; note = 2'-O-methyladenosine-3'-phosphate
  modified_base 4: mod_base = OTHER; note = 2'-O-methyluridine-3'-phosphate
  modified_base 5: mod_base = OTHER; note = 2'-O-methyluridine-3'-phosphate
  modified_base 6: mod_base = OTHER; note = 2'-O-hexadecyl-guanosine-3'-phosphate
  modified_base 7: mod_base = OTHER; note = 2'-O-methyluridine-3'-phosphate
  modified_base 8: mod_base = OTHER; note = 2'-O-methylcytidine-3'-phosphate
  modified_base 9: mod_base = OTHER; note = 2'-fluoroadenosine-3'-phosphate
  modified_base 10: mod_base = OTHER; note = 2'-fluoroguanosine-3'-phosphate
  modified_base 11: mod_base = OTHER; note = 2'-fluoroguanosine-3'-phosphate
  modified_base 12: mod_base = OTHER; note = 2'-O-methyladenosine-3'-phosphate
  modified_base 13: mod_base = OTHER; note = 2'-O-methylcytidine-3'-phosphate
  modified_base 14: mod_base = OTHER; note = 2'-O-methyladenosine-3'-phosphate
  modified_base 15: mod_base = OTHER; note = 2'-O-methyluridine-3'-phosphate
  modified_base 16: mod_base = OTHER; note = 2'-O-methyluridine-3'-phosphate
  modified_base 17: mod_base = OTHER; note = 2'-O-methyluridine-3'-phosphate
  modified_base 18: mod_base = OTHER; note = 2'-O-methylcytidine-3'-phosphate
  modified_base 19: mod_base = OTHER; note = 2'-O-methyladenosine-3'-phosphate
  modified_base 20: mod_base = OTHER; note = 2'-O-methyluridine-3'-phosphate
  modified_base 21: mod_base = OTHER; note = 2'-O-methyladenosine-3'-phosphate N-[tris(GalNAc-alkyl)-amidodecanoyl)]-4-hydroxyprolinol Hyp-(GalNAc-alkyl)3 (2S,4R)-1-[29-[[2-(acetylamino)-2-deoxy-beta-D-galactopyran osyl]oxy]-14,14-bis[[3-[[3-[[5-[[2-(acetylamino)-2-deoxy-be ta-D-galactopyranosyl]oxy]-1-oxopentyl]amino]propyl]amino]- 3-oxopropoxy]methyl]-1,12,19,25-tetraoxo-16-oxa-13,20,24-tr iazanonacos-1-yl]-4-hydroxy-2-hydroxymethylpyrrolidine
acattgtcaggacatttcata

SEQ ID NO: 782 - RNA, 21 nt, synthetic construct
  source 1..21: mol_type = other RNA
  modified_base 1: mod_base = OTHER; note = 2'-O-methylcytidine-3'- phosphorothioate
  modified_base 2: mod_base = OTHER; note = 2'-O-methyladenosine-3'- phosphorothioate
  modified_base 3: mod_base = OTHER; note = 2'-O-methyluridine-3'-phosphate
  modified_base 4: mod_base = OTHER; note = 2'-O-methyluridine-3'-phosphate
  modified_base 5: mod_base = OTHER; note = 2'-O-methylguanosine-3'-phosphate
  modified_base 6: mod_base = OTHER; note = 2'-O-hexadecyl-uridine-3'-phosphate
  modified_base 7: mod_base = OTHER; note = 2'-fluorocytidine-3'-phosphate
  modified_base 8: mod_base = OTHER; note = 2'-O-methyladenosine-3'-phosphate
  modified_base 9: mod_base = OTHER; note = 2'-fluoroguanosine-3'-phosphate
  modified_base 10: mod_base = OTHER; note = 2'-fluoroguanosine-3'-phosphate
  modified_base 11: mod_base = OTHER; note = 2'-fluoroadenosine-3'-phosphate
  modified_base 12: mod_base = OTHER; note = 2'-O-methylcytidine-3'-phosphate
  modified_base 13: mod_base = OTHER; note = 2'-O-methyladenosine-3'-phosphate
  modified_base 14: mod_base = OTHER; note = 2'-O-methyluridine-3'-phosphate
  modified_base 15: mod_base = OTHER; note = 2'-O-methyluridine-3'-phosphate
  modified_base 16: mod_base = OTHER; note = 2'-O-methyluridine-3'-phosphate
  modified_base 17: mod_base = OTHER; note = 2'-O-methylcytidine-3'-phosphate
  modified_base 18: mod_base = OTHER; note = 2'-O-methyladenosine-3'-phosphate
  modified_base 19: mod_base = OTHER; note = 2'-O-methyluridine-3'-phosphate
  modified_base 20: mod_base = OTHER; note = 2'-O-methyluridine-3'-phosphate
  modified_base 21: mod_base = OTHER; note = 2'-O-methyladenosine-3'-phosphate N-[tris(GalNAc-alkyl)-amidodecanoyl)]-4-hydroxyprolinol Hyp-(GalNAc-alkyl)3 (2S,4R)-1-[29-[[2-(acetylamino)-2-deoxy-beta-D-galactopyran osyl]oxy]-14,14-bis[[3-[[3-[[5-[[2-(acetylamino)-2-deoxy-be ta-D-galactopyranosyl]oxy]-1-oxopentyl]amino]propyl]amino]- 3-oxopropoxy]methyl]-1,12,19,25-tetraoxo-16-oxa-13,20,24-tr iazanonacos-1-yl]-4-hydroxy-2-hydroxymethylpyrrolidine
cattgtcaggacatttcatta

SEQ ID NO: 783 - RNA, 21 nt, synthetic construct
  source 1..21: mol_type = other RNA
  modified_base 1: mod_base = OTHER; note = 2'-O-methylcytidine-3'- phosphorothioate
  modified_base 2: mod_base = OTHER; note = 2'-O-methyladenosine-3'- phosphorothioate
  modified_base 3: mod_base = OTHER; note = 2'-O-methyluridine-3'-phosphate
  modified_base 4: mod_base = OTHER; note = 2'-O-methyluridine-3'-phosphate
  modified_base 5: mod_base = OTHER; note = 2'-O-methylguanosine-3'-phosphate
  modified_base 6: mod_base = OTHER; note = 2'-O-hexadecyl-uridine-3'-phosphate
  modified_base 7: mod_base = OTHER; note = 2'-O-methylcytidine-3'-phosphate
  modified_base 8: mod_base = OTHER; note = 2'-O-methyladenosine-3'-phosphate
  modified_base 9: mod_base = OTHER; note = 2'-fluoroguanosine-3'-phosphate
  modified_base 10: mod_base = OTHER; note = 2'-fluoroguanosine-3'-phosphate
  modified_base 11: mod_base = OTHER; note = 2'-fluoroadenosine-3'-phosphate
  modified_base 12: mod_base = OTHER; note = 2'-O-methylcytidine-3'-phosphate
  modified_base 13: mod_base = OTHER; note = 2'-O-methyladenosine-3'-phosphate
  modified_base 14: mod_base = OTHER; note = 2'-O-methyluridine-3'-phosphate
  modified_base 15: mod_base = OTHER; note = 2'-O-methyluridine-3'-phosphate
  modified_base 16: mod_base = OTHER; note = 2'-O-methyluridine-3'-phosphate
  modified_base 17: mod_base = OTHER; note = 2'-O-methylcytidine-3'-phosphate
  modified_base 18: mod_base = OTHER; note = 2'-O-methyladenosine-3'-phosphate
  modified_base 19: mod_base = OTHER; note = 2'-O-methyluridine-3'-phosphate
  modified_base 20: mod_base = OTHER; note = 2'-O-methyluridine-3'-phosphate
  modified_base 21: mod_base = OTHER; note = 2'-O-methyladenosine-3'-phosphate N-[tris(GalNAc-alkyl)-amidodecanoyl)]-4-hydroxyprolinol Hyp-(GalNAc-alkyl)3 (2S,4R)-1-[29-[[2-(acetylamino)-2-deoxy-beta-D-galactopyran osyl]oxy]-14,14-bis[[3-[[3-[[5-[[2-(acetylamino)-2-deoxy-be ta-D-galactopyranosyl]oxy]-1-oxopentyl]amino]propyl]amino]- 3-oxopropoxy]methyl]-1,12,19,25-tetraoxo-16-oxa-13,20,24-tr iazanonacos-1-yl]-4-hydroxy-2-hydroxymethylpyrrolidine
cattgtcaggacatttcatta

SEQ ID NO: 784 - RNA, 21 nt, synthetic construct
  source 1..21: mol_type = other RNA
  modified_base 1: mod_base = OTHER; note = 2'-O-methyluridine-3'-phosphorothioate
  modified_base 2: mod_base = OTHER; note = 2'-O-methyluridine-3'-phosphorothioate
  modified_base 3: mod_base = OTHER; note = 2'-O-methylguanosine-3'-phosphate
  modified_base 4: mod_base = OTHER; note = 2'-O-methyluridine-3'-phosphate
  modified_base 5: mod_base = OTHER; note = 2'-O-methylcytidine-3'-phosphate
  modified_base 6: mod_base = OTHER; note = 2'-O-hexadecyl-adenosine-3'-phosphate
  modified_base 7: mod_base = OTHER; note = 2'-fluoroguanosine-3'-phosphate
  modified_base 8: mod_base = OTHER; note = 2'-O-methylguanosine-3'-phosphate
  modified_base 9: mod_base = OTHER; note = 2'-fluoroadenosine-3'-phosphate
  modified_base 10: mod_base = OTHER; note = 2'-fluorocytidine-3'-phosphate
  modified_base 11: mod_base = OTHER; note = 2'-fluoroadenosine-3'-phosphate
  modified_base 12: mod_base = OTHER; note = 2'-O-methyluridine-3'-phosphate
  modified_base 13: mod_base = OTHER; note = 2'-O-methyluridine-3'-phosphate
  modified_base 14: mod_base = OTHER; note = 2'-O-methyluridine-3'-phosphate
  modified_base 15: mod_base = OTHER; note = 2'-O-methylcytidine-3'-phosphate
  modified_base 16: mod_base = OTHER; note = 2'-O-methyladenosine-3'-phosphate
  modified_base 17: mod_base = OTHER; note = 2'-O-methyluridine-3'-phosphate
  modified_base 18: mod_base = OTHER; note = 2'-O-methyluridine-3'-phosphate
  modified_base 19: mod_base = OTHER; note = 2'-O-methyluridine-3'-phosphate
  modified_base 20: mod_base = OTHER; note = 2'-O-methyladenosine-3'-phosphate
  modified_base 21: mod_base = OTHER; note = 2'-O-methyladenosine-3'-phosphate N-[tris(GalNAc-alkyl)-amidodecanoyl)]-4-hydroxyprolinol Hyp-(GalNAc-alkyl)3 (2S,4R)-1-[29-[[2-(acetylamino)-2-deoxy-beta-D-galactopyran osyl]oxy]-14,14-bis[[3-[[3-[[5-[[2-(acetylamino)-2-deoxy-be ta-D-galactopyranosyl]oxy]-1-oxopentyl]amino]propyl]amino]- 3-oxopropoxy]methyl]-1,12,19,25-tetraoxo-16-oxa-13,20,24-tr iazanonacos-1-yl]-4-hydroxy-2-hydroxymethylpyrrolidine
ttgtcaggacatttcatttaa

SEQ ID NO: 785 - RNA, 21 nt, synthetic construct
  source 1..21: mol_type = other RNA
  modified_base 1: mod_base = OTHER; note = 2'-O-methyluridine-3'-phosphorothioate
  modified_base 2: mod_base = OTHER; note = 2'-O-methyluridine-3'-phosphorothioate
  modified_base 3: mod_base = OTHER; note = 2'-O-methylguanosine-3'-phosphate
  modified_base 4: mod_base = OTHER; note = 2'-O-methyluridine-3'-phosphate
  modified_base 5: mod_base = OTHER; note = 2'-O-methylcytidine-3'-phosphate
  modified_base 6: mod_base = OTHER; note = 2'-O-hexadecyl-adenosine-3'-phosphate
  modified_base 7: mod_base = OTHER; note = 2'-O-methylguanosine-3'-phosphate
  modified_base 8: mod_base = OTHER; note = 2'-O-methylguanosine-3'-phosphate
  modified_base 9: mod_base = OTHER; note = 2'-fluoroadenosine-3'-phosphate
  modified_base 10: mod_base = OTHER; note = 2'-fluorocytidine-3'-phosphate
  modified_base 11: mod_base = OTHER; note = 2'-fluoroadenosine-3'-phosphate
  modified_base 12: mod_base = OTHER; note = 2'-O-methyluridine-3'-phosphate
  modified_base 13: mod_base = OTHER; note = 2'-O-methyluridine-3'-phosphate
  modified_base 14: mod_base = OTHER; note = 2'-O-methyluridine-3'-phosphate
  modified_base 15: mod_base = OTHER; note = 2'-O-methylcytidine-3'-phosphate
  modified_base 16: mod_base = OTHER; note = 2'-O-methyladenosine-3'-phosphate
  modified_base 17: mod_base = OTHER; note = 2'-O-methyluridine-3'-phosphate
  modified_base 18: mod_base = OTHER; note = 2'-O-methyluridine-3'-phosphate
  modified_base 19: mod_base = OTHER; note = 2'-O-methyluridine-3'-phosphate
  modified_base 20: mod_base = OTHER; note = 2'-O-methyladenosine-3'-phosphate
  modified_base 21: mod_base = OTHER; note = 2'-O-methyladenosine-3'-phosphate N-[tris(GalNAc-alkyl)-amidodecanoyl)]-4-hydroxyprolinol Hyp-(GalNAc-alkyl)3 (2S,4R)-1-[29-[[2-(acetylamino)-2-deoxy-beta-D-galactopyran osyl]oxy]-14,14-bis[[3-[[3-[[5-[[2-(acetylamino)-2-deoxy-be ta-D-galactopyranosyl]oxy]-1-oxopentyl]amino]propyl]amino]- 3-oxopropoxy]methyl]-1,12,19,25-tetraoxo-16-oxa-13,20,24-tr iazanonacos-1-yl]-4-hydroxy-2-hydroxymethylpyrrolidine
ttgtcaggacatttcatttaa

SEQ ID NO: 786 - RNA, 21 nt, synthetic construct
  source 1..21: mol_type = other RNA
  modified_base 1: mod_base = OTHER; note = 2'-O-methyluridine-3'-phosphorothioate
  modified_base 2: mod_base = OTHER; note = 2'-O-methylcytidine-3'- phosphorothioate
  modified_base 3: mod_base = OTHER; note = 2'-O-methyladenosine-3'-phosphate
  modified_base 4: mod_base = OTHER; note = 2'-O-methylguanosine-3'-phosphate
  modified_base 5: mod_base = OTHER; note = 2'-O-methylguanosine-3'-phosphate
  modified_base 6: mod_base = OTHER; note = 2'-O-hexadecyl-adenosine-3'-phosphate
  modified_base 7: mod_base = OTHER; note = 2'-fluorocytidine-3'-phosphate
  modified_base 8: mod_base = OTHER; note = 2'-O-methyladenosine-3'-phosphate
  modified_base 9: mod_base = OTHER; note = 2'-fluorouridine-3'-phosphate
  modified_base 10: mod_base = OTHER; note = 2'-fluorouridine-3'-phosphate
  modified_base 11: mod_base = OTHER; note = 2'-fluorouridine-3'-phosphate
  modified_base 12: mod_base = OTHER; note = 2'-O-methylcytidine-3'-phosphate
  modified_base 13: mod_base = OTHER; note = 2'-O-methyladenosine-3'-phosphate
  modified_base 14: mod_base = OTHER; note = 2'-O-methyluridine-3'-phosphate
  modified_base 15: mod_base = OTHER; note = 2'-O-methyluridine-3'-phosphate
  modified_base 16: mod_base = OTHER; note = 2'-O-methyluridine-3'-phosphate
  modified_base 17: mod_base = OTHER; note = 2'-O-methyladenosine-3'-phosphate
  modified_base 18: mod_base = OTHER; note = 2'-O-methylguanosine-3'-phosphate
  modified_base 19: mod_base = OTHER; note = 2'-O-methyluridine-3'-phosphate
  modified_base 20: mod_base = OTHER; note = 2'-O-methyluridine-3'-phosphate
  modified_base 21: mod_base = OTHER; note = 2'-O-methyladenosine-3'-phosphate N-[tris(GalNAc-alkyl)-amidodecanoyl)]-4-hydroxyprolinol Hyp-(GalNAc-alkyl)3 (2S,4R)-1-[29-[[2-(acetylamino)-2-deoxy-beta-D-galactopyran osyl]oxy]-14,14-bis[[3-[[3-[[5-[[2-(acetylamino)-2-deoxy-be ta-D-galactopyranosyl]oxy]-1-oxopentyl]amino]propyl]amino]- 3-oxopropoxy]methyl]-1,12,19,25-tetraoxo-16-oxa-13,20,24-tr iazanonacos-1-yl]-4-hydroxy-2-hydroxymethylpyrrolidine
tcaggacatttcatttagtta

SEQ ID NO: 787 - RNA, 21 nt, synthetic construct
  source 1..21: mol_type = other RNA
  modified_base 1: mod_base = OTHER; note = 2'-O-methyluridine-3'-phosphorothioate
  modified_base 2: mod_base = OTHER; note = 2'-O-methylcytidine-3'- phosphorothioate
  modified_base 3: mod_base = OTHER; note = 2'-O-methyladenosine-3'-phosphate
  modified_base 4: mod_base = OTHER; note = 2'-O-methylguanosine-3'-phosphate
  modified_base 5: mod_base = OTHER; note = 2'-O-methylguanosine-3'-phosphate
  modified_base 6: mod_base = OTHER; note = 2'-O-hexadecyl-adenosine-3'-phosphate
  modified_base 7: mod_base = OTHER; note = 2'-O-methylcytidine-3'-phosphate
  modified_base 8: mod_base = OTHER; note = 2'-O-methyladenosine-3'-phosphate
  modified_base 9: mod_base = OTHER; note = 2'-fluorouridine-3'-phosphate
  modified_base 10: mod_base = OTHER; note = 2'-fluorouridine-3'-phosphate
  modified_base 11: mod_base = OTHER; note = 2'-fluorouridine-3'-phosphate
  modified_base 12: mod_base = OTHER; note = 2'-O-methylcytidine-3'-phosphate
  modified_base 13: mod_base = OTHER; note = 2'-O-methyladenosine-3'-phosphate
  modified_base 14: mod_base = OTHER; note = 2'-O-methyluridine-3'-phosphate
  modified_base 15: mod_base = OTHER; note = 2'-O-methyluridine-3'-phosphate
  modified_base 16: mod_base = OTHER; note = 2'-O-methyluridine-3'-phosphate
  modified_base 17: mod_base = OTHER; note = 2'-O-methyladenosine-3'-phosphate
  modified_base 18: mod_base = OTHER; note = 2'-O-methylguanosine-3'-phosphate
  modified_base 19: mod_base = OTHER; note = 2'-O-methyluridine-3'-phosphate
  modified_base 20: mod_base = OTHER; note = 2'-O-methyluridine-3'-phosphate
  modified_base 21: mod_base = OTHER; note = 2'-O-methyladenosine-3'-phosphate N-[tris(GalNAc-alkyl)-amidodecanoyl)]-4-hydroxyprolinol Hyp-(GalNAc-alkyl)3 (2S,4R)-1-[29-[[2-(acetylamino)-2-deoxy-beta-D-galactopyran osyl]oxy]-14,14-bis[[3-[[3-[[5-[[2-(acetylamino)-2-deoxy-be ta-D-galactopyranosyl]oxy]-1-oxopentyl]amino]propyl]amino]- 3-oxopropoxy]methyl]-1,12,19,25-tetraoxo-16-oxa-13,20,24-tr iazanonacos-1-yl]-4-hydroxy-2-hydroxymethylpyrrolidine
tcaggacatttcatttagtta

SEQ ID NO: 788 - RNA, 21 nt, synthetic construct
  source 1..21: mol_type = other RNA
  modified_base 1: mod_base = OTHER; note = 2'-O-methylcytidine-3'- phosphorothioate
  modified_base 2: mod_base = OTHER; note = 2'-O-methyladenosine-3'- phosphorothioate
  modified_base 3: mod_base = OTHER; note = 2'-O-methylguanosine-3'-phosphate
  modified_base 4: mod_base = OTHER; note = 2'-O-methylguanosine-3'-phosphate
  modified_base 5: mod_base = OTHER; note = 2'-O-methyladenosine-3'-phosphate
  modified_base 6: mod_base = OTHER; note = 2'-O-hexadecyl-cytidine-3'-phosphate
  modified_base 7: mod_base = OTHER; note = 2'-fluoroadenosine-3'-phosphate
  modified_base 8: mod_base = OTHER; note = 2'-O-methyluridine-3'-phosphate
  modified_base 9: mod_base = OTHER; note = 2'-fluorouridine-3'-phosphate
  modified_base 10: mod_base = OTHER; note = 2'-fluorouridine-3'-phosphate
  modified_base 11: mod_base = OTHER; note = 2'-fluorocytidine-3'-phosphate
  modified_base 12: mod_base = OTHER; note = 2'-O-methyladenosine-3'-phosphate
  modified_base 13: mod_base = OTHER; note = 2'-O-methyluridine-3'-phosphate
  modified_base 14: mod_base = OTHER; note = 2'-O-methyluridine-3'-phosphate
  modified_base 15: mod_base = OTHER; note = 2'-O-methyluridine-3'-phosphate
  modified_base 16: mod_base = OTHER; note = 2'-O-methyladenosine-3'-phosphate
  modified_base 17: mod_base = OTHER; note = 2'-O-methylguanosine-3'-phosphate
  modified_base 18: mod_base = OTHER; note = 2'-O-methyluridine-3'-phosphate
  modified_base 19: mod_base = OTHER; note = 2'-O-methyluridine-3'-phosphate
  modified_base 20: mod_base = OTHER; note = 2'-O-methylcytidine-3'-phosphate
  modified_base 21: mod_base = OTHER; note = 2'-O-methyladenosine-3'-phosphate N-[tris(GalNAc-alkyl)-amidodecanoyl)]-4-hydroxyprolinol Hyp-(GalNAc-alkyl)3 (2S,4R)-1-[29-[[2-(acetylamino)-2-deoxy-beta-D-galactopyran osyl]oxy]-14,14-bis[[3-[[3-[[5-[[2-(acetylamino)-2-deoxy-be ta-D-galactopyranosyl]oxy]-1-oxopentyl]amino]propyl]amino]- 3-oxopropoxy]methyl]-1,12,19,25-tetraoxo-16-oxa-13,20,24-tr iazanonacos-1-yl]-4-hydroxy-2-hydroxymethylpyrrolidine
caggacatttcatttagttca

SEQ ID NO: 789 - RNA, 21 nt, synthetic construct
  source 1..21: mol_type = other RNA
  modified_base 1: mod_base = OTHER; note = 2'-O-methylcytidine-3'- phosphorothioate
  modified_base 2: mod_base = OTHER; note = 2'-O-methyladenosine-3'- phosphorothioate
  modified_base 3: mod_base = OTHER; note = 2'-O-methylguanosine-3'-phosphate
  modified_base 4: mod_base = OTHER; note = 2'-O-methylguanosine-3'-phosphate
  modified_base 5: mod_base = OTHER; note = 2'-O-methyladenosine-3'-phosphate
  modified_base 6: mod_base = OTHER; note = 2'-O-hexadecyl-cytidine-3'-phosphate
  modified_base 7: mod_base = OTHER; note = 2'-O-methyladenosine-3'-phosphate
  modified_base 8: mod_base = OTHER; note = 2'-O-methyluridine-3'-phosphate
  modified_base 9: mod_base = OTHER; note = 2'-fluorouridine-3'-phosphate
  modified_base 10: mod_base = OTHER; note = 2'-fluorouridine-3'-phosphate
  modified_base 11: mod_base = OTHER; note = 2'-fluorocytidine-3'-phosphate
  modified_base 12: mod_base = OTHER; note = 2'-O-methyladenosine-3'-phosphate
  modified_base 13: mod_base = OTHER; note = 2'-O-methyluridine-3'-phosphate
  modified_base 14: mod_base = OTHER; note = 2'-O-methyluridine-3'-phosphate
  modified_base 15: mod_base = OTHER; note = 2'-O-methyluridine-3'-phosphate
  modified_base 16: mod_base = OTHER; note = 2'-O-methyladenosine-3'-phosphate
  modified_base 17: mod_base = OTHER; note = 2'-O-methylguanosine-3'-phosphate
  modified_base 18: mod_base = OTHER; note = 2'-O-methyluridine-3'-phosphate
  modified_base 19: mod_base = OTHER; note = 2'-O-methyluridine-3'-phosphate
  modified_base 20: mod_base = OTHER; note = 2'-O-methylcytidine-3'-phosphate
  modified_base 21: mod_base = OTHER; note = 2'-O-methyladenosine-3'-phosphate N-[tris(GalNAc-alkyl)-amidodecanoyl)]-4-hydroxyprolinol Hyp-(GalNAc-alkyl)3 (2S,4R)-1-[29-[[2-(acetylamino)-2-deoxy-beta-D-galactopyran osyl]oxy]-14,14-bis[[3-[[3-[[5-[[2-(acetylamino)-2-deoxy-be ta-D-galactopyranosyl]oxy]-1-oxopentyl]amino]propyl]amino]- 3-oxopropoxy]methyl]-1,12,19,25-tetraoxo-16-oxa-13,20,24-tr iazanonacos-1-yl]-4-hydroxy-2-hydroxymethylpyrrolidine
caggacatttcatttagttca

SEQ ID NO: 790 - RNA, 21 nt, synthetic construct
  source 1..21: mol_type = other RNA
  modified_base 1: mod_base = OTHER; note = 2'-O-methyladenosine-3'- phosphorothioate
  modified_base 2: mod_base = OTHER; note = 2'-O-methylguanosine-3'- phosphorothioate
  modified_base 3: mod_base = OTHER; note = 2'-O-methylguanosine-3'-phosphate
  modified_base 4: mod_base = OTHER; note = 2'-O-methyladenosine-3'-phosphate
  modified_base 5: mod_base = OTHER; note = 2'-O-methylcytidine-3'-phosphate
  modified_base 6: mod_base = OTHER; note = 2'-O-hexadecyl-adenosine-3'-phosphate
  modified_base 7: mod_base = OTHER; note = 2'-fluorouridine-3'-phosphate
  modified_base 8: mod_base = OTHER; note = 2'-O-methyluridine-3'-phosphate
  modified_base 9: mod_base = OTHER; note = 2'-fluorouridine-3'-phosphate
  modified_base 10: mod_base = OTHER; note = 2'-fluorocytidine-3'-phosphate
  modified_base 11: mod_base = OTHER; note = 2'-fluoroadenosine-3'-phosphate
  modified_base 12: mod_base = OTHER; note = 2'-O-methyluridine-3'-phosphate
  modified_base 13: mod_base = OTHER; note = 2'-O-methyluridine-3'-phosphate
  modified_base 14: mod_base = OTHER; note = 2'-O-methyluridine-3'-phosphate
  modified_base 15: mod_base = OTHER; note = 2'-O-methyladenosine-3'-phosphate
  modified_base 16: mod_base = OTHER; note = 2'-O-methylguanosine-3'-phosphate
  modified_base 17: mod_base = OTHER; note = 2'-O-methyluridine-3'-phosphate
  modified_base 18: mod_base = OTHER; note = 2'-O-methyluridine-3'-phosphate
  modified_base 19: mod_base = OTHER; note = 2'-O-methylcytidine-3'-phosphate
  modified_base 20: mod_base = OTHER; note = 2'-O-methyladenosine-3'-phosphate
  modified_base 21: mod_base = OTHER; note = 2'-O-methyladenosine-3'-phosphate N-[tris(GalNAc-alkyl)-amidodecanoyl)]-4-hydroxyprolinol Hyp-(GalNAc-alkyl)3 (2S,4R)-1-[29-[[2-(acetylamino)-2-deoxy-beta-D-galactopyran osyl]oxy]-14,14-bis[[3-[[3-[[5-[[2-(acetylamino)-2-deoxy-be ta-D-galactopyranosyl]oxy]-1-oxopentyl]amino]propyl]amino]- 3-oxopropoxy]methyl]-1,12,19,25-tetraoxo-16-oxa-13,20,24-tr iazanonacos-1-yl]-4-hydroxy-2-hydroxymethylpyrrolidine
aggacatttcatttagttcaa

SEQ ID NO: 791 - RNA, 21 nt, synthetic construct
  source 1..21: mol_type = other RNA
  modified_base 1: mod_base = OTHER; note = 2'-O-methylguanosine-3'- phosphorothioate
  modified_base 2: mod_base = OTHER; note = 2'-O-methylguanosine-3'- phosphorothioate
  modified_base 3: mod_base = OTHER; note = 2'-O-methyladenosine-3'-phosphate
  modified_base 4: mod_base = OTHER; note = 2'-O-methylcytidine-3'-phosphate
  modified_base 5: mod_base = OTHER; note = 2'-O-methyladenosine-3'-phosphate
  modified_base 6: mod_base = OTHER; note = 2'-O-hexadecyl-uridine-3'-phosphate
  modified_base 7: mod_base = OTHER; note = 2'-fluorouridine-3'-phosphate
  modified_base 8: mod_base = OTHER; note = 2'-O-methyluridine-3'-phosphate
  modified_base 9: mod_base = OTHER; note = 2'-fluorocytidine-3'-phosphate
  modified_base 10: mod_base = OTHER; note = 2'-fluoroadenosine-3'-phosphate
  modified_base 11: mod_base = OTHER; note = 2'-fluorouridine-3'-phosphate
  modified_base 12: mod_base = OTHER; note = 2'-O-methyluridine-3'-phosphate
  modified_base 13: mod_base = OTHER; note = 2'-O-methyluridine-3'-phosphate
  modified_base 14: mod_base = OTHER; note = 2'-O-methyladenosine-3'-phosphate
  modified_base 15: mod_base = OTHER; note = 2'-O-methylguanosine-3'-phosphate
  modified_base 16: mod_base = OTHER; note = 2'-O-methyluridine-3'-phosphate
  modified_base 17: mod_base = OTHER; note = 2'-O-methyluridine-3'-phosphate
  modified_base 18: mod_base = OTHER; note = 2'-O-methylcytidine-3'-phosphate
  modified_base 19: mod_base = OTHER; note = 2'-O-methyladenosine-3'-phosphate
  modified_base 20: mod_base = OTHER; note = 2'-O-methyluridine-3'-phosphate
  modified_base 21: mod_base = OTHER; note = 2'-O-methyladenosine-3'-phosphate N-[tris(GalNAc-alkyl)-amidodecanoyl)]-4-hydroxyprolinol Hyp-(GalNAc-alkyl)3 (2S,4R)-1-[29-[[2-(acetylamino)-2-deoxy-beta-D-galactopyran osyl]oxy]-14,14-bis[[3-[[3-[[5-[[2-(acetylamino)-2-deoxy-be ta-D-galactopyranosyl]oxy]-1-oxopentyl]amino]propyl]amino]- 3-oxopropoxy]methyl]-1,12,19,25-tetraoxo-16-oxa-13,20,24-tr iazanonacos-1-yl]-4-hydroxy-2-hydroxymethylpyrrolidine
ggacatttcatttagttcata

SEQ ID NO: 792 - RNA, 21 nt, synthetic construct
  source 1..21: mol_type = other RNA
  modified_base 1: mod_base = OTHER; note = 2'-O-methylguanosine-3'- phosphorothioate
  modified_base 2: mod_base = OTHER; note = 2'-O-methylguanosine-3'- phosphorothioate
  modified_base 3: mod_base = OTHER; note = 2'-O-methyladenosine-3'-phosphate
  modified_base 4: mod_base = OTHER; note = 2'-O-methylcytidine-3'-phosphate
  modified_base 5: mod_base = OTHER; note = 2'-O-methyladenosine-3'-phosphate
  modified_base 6: mod_base = OTHER; note = 2'-O-hexadecyl-uridine-3'-phosphate
  modified_base 7: mod_base = OTHER; note = 2'-O-methyluridine-3'-phosphate
  modified_base 8: mod_base = OTHER; note = 2'-O-methyluridine-3'-phosphate
  modified_base 9: mod_base = OTHER; note = 2'-fluorocytidine-3'-phosphate
  modified_base 10: mod_base = OTHER; note = 2'-fluoroadenosine-3'-phosphate
  modified_base 11: mod_base = OTHER; note = 2'-fluorouridine-3'-phosphate
  modified_base 12: mod_base = OTHER; note = 2'-O-methyluridine-3'-phosphate
  modified_base 13: mod_base = OTHER; note = 2'-O-methyluridine-3'-phosphate
  modified_base 14: mod_base = OTHER; note = 2'-O-methyladenosine-3'-phosphate
  modified_base 15: mod_base = OTHER; note = 2'-O-methylguanosine-3'-phosphate
  modified_base 16: mod_base = OTHER; note = 2'-O-methyluridine-3'-phosphate
  modified_base 17: mod_base = OTHER; note = 2'-O-methyluridine-3'-phosphate
  modified_base 18: mod_base = OTHER; note = 2'-O-methylcytidine-3'-phosphate
  modified_base 19: mod_base = OTHER; note = 2'-O-methyladenosine-3'-phosphate
  modified_base 20: mod_base = OTHER; note = 2'-O-methyluridine-3'-phosphate
  modified_base 21: mod_base = OTHER; note = 2'-O-methyladenosine-3'-phosphate N-[tris(GalNAc-alkyl)-amidodecanoyl)]-4-hydroxyprolinol Hyp-(GalNAc-alkyl)3 (2S,4R)-1-[29-[[2-(acetylamino)-2-deoxy-beta-D-galactopyran osyl]oxy]-14,14-bis[[3-[[3-[[5-[[2-(acetylamino)-2-deoxy-be ta-D-galactopyranosyl]oxy]-1-oxopentyl]amino]propyl]amino]- 3-oxopropoxy]methyl]-1,12,19,25-tetraoxo-16-oxa-13,20,24-tr iazanonacos-1-yl]-4-hydroxy-2-hydroxymethylpyrrolidine
ggacatttcatttagttcata

SEQ ID NO: 793 - RNA, 21 nt, synthetic construct
  source 1..21: mol_type = other RNA
  modified_base 1: mod_base = OTHER; note = 2'-O-methyladenosine-3'- phosphorothioate
  modified_base 2: mod_base = OTHER; note = 2'-O-methylcytidine-3'- phosphorothioate
  modified_base 3: mod_base = OTHER; note = 2'-O-methyladenosine-3'-phosphate
  modified_base 4: mod_base = OTHER; note = 2'-O-methyluridine-3'-phosphate
  modified_base 5: mod_base = OTHER; note = 2'-O-methyluridine-3'-phosphate
  modified_base 6: mod_base = OTHER; note = 2'-O-hexadecyl-uridine-3'-phosphate
  modified_base 7: mod_base = OTHER; note = 2'-fluorocytidine-3'-phosphate
  modified_base 8: mod_base = OTHER; note = 2'-O-methyladenosine-3'-phosphate
  modified_base 9: mod_base = OTHER; note = 2'-fluorouridine-3'-phosphate
  modified_base 10: mod_base = OTHER; note = 2'-fluorouridine-3'-phosphate
  modified_base 11: mod_base = OTHER; note = 2'-fluorouridine-3'-phosphate
  modified_base 12: mod_base = OTHER; note = 2'-O-methyladenosine-3'-phosphate
  modified_base 13: mod_base = OTHER; note = 2'-O-methylguanosine-3'-phosphate
  modified_base 14: mod_base = OTHER; note = 2'-O-methyluridine-3'-phosphate
  modified_base 15: mod_base = OTHER; note = 2'-O-methyluridine-3'-phosphate
  modified_base 16: mod_base = OTHER; note = 2'-O-methylcytidine-3'-phosphate
  modified_base 17: mod_base = OTHER; note = 2'-O-methyladenosine-3'-phosphate
  modified_base 18: mod_base = OTHER; note = 2'-O-methyluridine-3'-phosphate
  modified_base 19: mod_base = OTHER; note = 2'-O-methylguanosine-3'-phosphate
  modified_base 20: mod_base = OTHER; note = 2'-O-methyladenosine-3'-phosphate
  modified_base 21: mod_base = OTHER; note = 2'-O-methyladenosine-3'-phosphate N-[tris(GalNAc-alkyl)-amidodecanoyl)]-4-hydroxyprolinol Hyp-(GalNAc-alkyl)3 (2S,4R)-1-[29-[[2-(acetylamino)-2-deoxy-beta-D-galactopyran osyl]oxy]-14,14-bis[[3-[[3-[[5-[[2-(acetylamino)-2-deoxy-be ta-D-galactopyranosyl]oxy]-1-oxopentyl]amino]propyl]amino]- 3-oxopropoxy]methyl]-1,12,19,25-tetraoxo-16-oxa-13,20,24-tr iazanonacos-1-yl]-4-hydroxy-2-hydroxymethylpyrrolidine
acatttcatttagttcatgaa

SEQ ID NO: 794 - RNA, 21 nt, synthetic construct
  source 1..21: mol_type = other RNA
  modified_base 1: mod_base = OTHER; note = 2'-O-methyluridine-3'-phosphorothioate
  modified_base 2: mod_base = OTHER; note = 2'-O-methyluridine-3'-phosphorothioate
  modified_base 3: mod_base = OTHER; note = 2'-O-methyluridine-3'-phosphate
  modified_base 4: mod_base = OTHER; note = 2'-O-methylcytidine-3'-phosphate
  modified_base 5: mod_base = OTHER; note = 2'-O-methyladenosine-3'-phosphate
  modified_base 6: mod_base = OTHER; note = 2'-O-hexadecyl-uridine-3'-phosphate
  modified_base 7: mod_base = OTHER; note = 2'-fluorouridine-3'-phosphate
  modified_base 8: mod_base = OTHER; note = 2'-O-methyluridine-3'-phosphate
  modified_base 9: mod_base = OTHER; note = 2'-fluoroadenosine-3'-phosphate
  modified_base 10: mod_base = OTHER; note = 2'-fluoroguanosine-3'-phosphate
  modified_base 11: mod_base = OTHER; note = 2'-fluorouridine-3'-phosphate
  modified_base 12: mod_base = OTHER; note = 2'-O-methyluridine-3'-phosphate
  modified_base 13: mod_base = OTHER; note = 2'-O-methylcytidine-3'-phosphate
  modified_base 14: mod_base = OTHER; note = 2'-O-methyladenosine-3'-phosphate
  modified_base 15: mod_base = OTHER; note = 2'-O-methyluridine-3'-phosphate
  modified_base 16: mod_base = OTHER; note = 2'-O-methylguanosine-3'-phosphate
  modified_base 17: mod_base = OTHER; note = 2'-O-methyladenosine-3'-phosphate
  modified_base 18: mod_base = OTHER; note = 2'-O-methyluridine-3'-phosphate
  modified_base 19: mod_base = OTHER; note = 2'-O-methylcytidine-3'-phosphate
  modified_base 20: mod_base = OTHER; note = 2'-O-methyladenosine-3'-phosphate
  modified_base 21: mod_base = OTHER; note = 2'-O-methyladenosine-3'-phosphate N-[tris(GalNAc-alkyl)-amidodecanoyl)]-4-hydroxyprolinol Hyp-(GalNAc-alkyl)3 (2S,4R)-1-[29-[[2-(acetylamino)-2-deoxy-beta-D-galactopyran osyl]oxy]-14,14-bis[[3-[[3-[[5-[[2-(acetylamino)-2-deoxy-be ta-D-galactopyranosyl]oxy]-1-oxopentyl]amino]propyl]amino]- 3-oxopropoxy]methyl]-1,12,19,25-tetraoxo-16-oxa-13,20,24-tr iazanonacos-1-yl]-4-hydroxy-2-hydroxymethylpyrrolidine
tttcatttagttcatgatcaa

SEQ ID NO: 795 - RNA, 21 nt, synthetic construct
  source 1..21: mol_type = other RNA
  modified_base 1: mod_base = OTHER; note = 2'-O-methyluridine-3'-phosphorothioate
  modified_base 2: mod_base = OTHER; note = 2'-O-methylcytidine-3'- phosphorothioate
  modified_base 3: mod_base = OTHER; note = 2'-O-methyladenosine-3'-phosphate
  modified_base 4: mod_base = OTHER; note = 2'-O-methyluridine-3'-phosphate
  modified_base 5: mod_base = OTHER; note = 2'-O-methyluridine-3'-phosphate
  modified_base 6: mod_base = OTHER; note = 2'-O-hexadecyl-uridine-3'-phosphate
  modified_base 7: mod_base = OTHER; note = 2'-fluoroadenosine-3'-phosphate
  modified_base 8: mod_base = OTHER; note = 2'-O-methylguanosine-3'-phosphate
  modified_base 9: mod_base = OTHER; note = 2'-fluorouridine-3'-phosphate
  modified_base 10: mod_base = OTHER; note = 2'-fluorouridine-3'-phosphate
  modified_base 11: mod_base = OTHER; note = 2'-fluorocytidine-3'-phosphate
  modified_base 12: mod_base = OTHER; note = 2'-O-methyladenosine-3'-phosphate
  modified_base 13: mod_base = OTHER; note = 2'-O-methyluridine-3'-phosphate
  modified_base 14: mod_base = OTHER; note = 2'-O-methylguanosine-3'-phosphate
  modified_base 15: mod_base = OTHER; note = 2'-O-methyladenosine-3'-phosphate
  modified_base 16: mod_base = OTHER; note = 2'-O-methyluridine-3'-phosphate
  modified_base 17: mod_base = OTHER; note = 2'-O-methylcytidine-3'-phosphate
  modified_base 18: mod_base = OTHER; note = 2'-O-methyladenosine-3'-phosphate
  modified_base 19: mod_base = OTHER; note = 2'-O-methylcytidine-3'-phosphate
  modified_base 20: mod_base = OTHER; note = 2'-O-methylguanosine-3'-phosphate
  modified_base 21: mod_base = OTHER; note = 2'-O-methyladenosine-3'-phosphate N-[tris(GalNAc-alkyl)-amidodecanoyl)]-4-hydroxyprolinol Hyp-(GalNAc-alkyl)3 (2S,4R)-1-[29-[[2-(acetylamino)-2-deoxy-beta-D-galactopyran osyl]oxy]-14,14-bis[[3-[[3-[[5-[[2-(acetylamino)-2-deoxy-be ta-D-galactopyranosyl]oxy]-1-oxopentyl]amino]propyl]amino]- 3-oxopropoxy]methyl]-1,12,19,25-tetraoxo-16-oxa-13,20,24-tr iazanonacos-1-yl]-4-hydroxy-2-hydroxymethylpyrrolidine
tcatttagttcatgatcacga

SEQ ID NO: 796 - RNA, 21 nt, synthetic construct
  source 1..21: mol_type = other RNA
  modified_base 1: mod_base = OTHER; note = 2'-O-methylcytidine-3'- phosphorothioate
  modified_base 2: mod_base = OTHER; note = 2'-O-methyladenosine-3'- phosphorothioate
  modified_base 3: mod_base = OTHER; note = 2'-O-methyluridine-3'-phosphate
  modified_base 4: mod_base = OTHER; note = 2'-O-methyluridine-3'-phosphate
  modified_base 5: mod_base = OTHER; note = 2'-O-methyluridine-3'-phosphate
  modified_base 6: mod_base = OTHER; note = 2'-O-hexadecyl-adenosine-3'-phosphate
  modified_base 7: mod_base = OTHER; note = 2'-fluoroguanosine-3'-phosphate
  modified_base 8: mod_base = OTHER; note = 2'-O-methyluridine-3'-phosphate
  modified_base 9: mod_base = OTHER; note = 2'-fluorouridine-3'-phosphate
  modified_base 10: mod_base = OTHER; note = 2'-fluorocytidine-3'-phosphate
  modified_base 11: mod_base = OTHER; note = 2'-fluoroadenosine-3'-phosphate
  modified_base 12: mod_base = OTHER; note = 2'-O-methyluridine-3'-phosphate
  modified_base 13: mod_base = OTHER; note = 2'-O-methylguanosine-3'-phosphate
  modified_base 14: mod_base = OTHER; note = 2'-O-methyladenosine-3'-phosphate
  modified_base 15: mod_base = OTHER; note = 2'-O-methyluridine-3'-phosphate
  modified_base 16: mod_base = OTHER; note = 2'-O-methylcytidine-3'-phosphate
  modified_base 17: mod_base = OTHER; note = 2'-O-methyladenosine-3'-phosphate
  modified_base 18: mod_base = OTHER; note = 2'-O-methylcytidine-3'-phosphate
  modified_base 19: mod_base = OTHER; note = 2'-O-methylguanosine-3'-phosphate
  modified_base 20: mod_base = OTHER; note = 2'-O-methylguanosine-3'-phosphate
  modified_base 21: mod_base = OTHER; note = 2'-O-methyladenosine-3'-phosphate N-[tris(GalNAc-alkyl)-amidodecanoyl)]-4-hydroxyprolinol Hyp-(GalNAc-alkyl)3 (2S,4R)-1-[29-[[2-(acetylamino)-2-deoxy-beta-D-galactopyran osyl]oxy]-14,14-bis[[3-[[3-[[5-[[2-(acetylamino)-2-deoxy-be ta-D-galactopyranosyl]oxy]-1-oxopentyl]amino]propyl]amino]- 3-oxopropoxy]methyl]-1,12,19,25-tetraoxo-16-oxa-13,20,24-tr iazanonacos-1-yl]-4-hydroxy-2-hydroxymethylpyrrolidine
catttagttcatgatcacgga

SEQ ID NO: 797 - RNA, 21 nt, synthetic construct
  source 1..21: mol_type = other RNA
  modified_base 1: mod_base = OTHER; note = 2'-O-methylcytidine-3'- phosphorothioate
  modified_base 2: mod_base = OTHER; note = 2'-O-methyladenosine-3'- phosphorothioate
  modified_base 3: mod_base = OTHER; note = 2'-O-methyluridine-3'-phosphate
  modified_base 4: mod_base = OTHER; note = 2'-O-methyluridine-3'-phosphate
  modified_base 5: mod_base = OTHER; note = 2'-O-methyluridine-3'-phosphate
  modified_base 6: mod_base = OTHER; note = 2'-O-hexadecyl-adenosine-3'-phosphate
  modified_base 7: mod_base = OTHER; note = 2'-O-methylguanosine-3'-phosphate
  modified_base 8: mod_base = OTHER; note = 2'-O-methyluridine-3'-phosphate
  modified_base 9: mod_base = OTHER; note = 2'-fluorouridine-3'-phosphate
  modified_base 10: mod_base = OTHER; note = 2'-fluorocytidine-3'-phosphate
  modified_base 11: mod_base = OTHER; note = 2'-fluoroadenosine-3'-phosphate
  modified_base 12: mod_base = OTHER; note = 2'-O-methyluridine-3'-phosphate
  modified_base 13: mod_base = OTHER; note = 2'-O-methylguanosine-3'-phosphate
  modified_base 14: mod_base = OTHER; note = 2'-O-methyladenosine-3'-phosphate
  modified_base 15: mod_base = OTHER; note = 2'-O-methyluridine-3'-phosphate
  modified_base 16: mod_base = OTHER; note = 2'-O-methylcytidine-3'-phosphate
  modified_base 17: mod_base = OTHER; note = 2'-O-methyladenosine-3'-phosphate
  modified_base 18: mod_base = OTHER; note = 2'-O-methylcytidine-3'-phosphate
  modified_base 19: mod_base = OTHER; note = 2'-O-methylguanosine-3'-phosphate
  modified_base 20: mod_base = OTHER; note = 2'-O-methylguanosine-3'-phosphate
  modified_base 21: mod_base = OTHER; note = 2'-O-methyladenosine-3'-phosphate N-[tris(GalNAc-alkyl)-amidodecanoyl)]-4-hydroxyprolinol Hyp-(GalNAc-alkyl)3 (2S,4R)-1-[29-[[2-(acetylamino)-2-deoxy-beta-D-galactopyran osyl]oxy]-14,14-bis[[3-[[3-[[5-[[2-(acetylamino)-2-deoxy-be ta-D-galactopyranosyl]oxy]-1-oxopentyl]amino]propyl]amino]- 3-oxopropoxy]methyl]-1,12,19,25-tetraoxo-16-oxa-13,20,24-tr iazanonacos-1-yl]-4-hydroxy-2-hydroxymethylpyrrolidine
catttagttcatgatcacgga

SEQ ID NO: 798 - RNA, 21 nt, synthetic construct
  source 1..21: mol_type = other RNA
  modified_base 1: mod_base = OTHER; note = 2'-O-methyladenosine-3'- phosphorothioate
  modified_base 2: mod_base = OTHER; note = 2'-O-methyluridine-3'-phosphorothioate
  modified_base 3: mod_base = OTHER; note = 2'-O-methyluridine-3'-phosphate
  modified_base 4: mod_base = OTHER; note = 2'-O-methyluridine-3'-phosphate
  modified_base 5: mod_base = OTHER; note = 2'-O-methyladenosine-3'-phosphate
  modified_base 6: mod_base = OTHER; note = 2'-O-hexadecyl-guanosine-3'-phosphate
  modified_base 7: mod_base = OTHER; note = 2'-fluorouridine-3'-phosphate
  modified_base 8: mod_base = OTHER; note = 2'-O-methyluridine-3'-phosphate
  modified_base 9: mod_base = OTHER; note = 2'-fluorocytidine-3'-phosphate
  modified_base 10: mod_base = OTHER; note = 2'-fluoroadenosine-3'-phosphate
  modified_base 11: mod_base = OTHER; note = 2'-fluorouridine-3'-phosphate
  modified_base 12: mod_base = OTHER; note = 2'-O-methylguanosine-3'-phosphate
  modified_base 13: mod_base = OTHER; note = 2'-O-methyladenosine-3'-phosphate
  modified_base 14: mod_base = OTHER; note = 2'-O-methyluridine-3'-phosphate
  modified_base 15: mod_base = OTHER; note = 2'-O-methylcytidine-3'-phosphate
  modified_base 16: mod_base = OTHER; note = 2'-O-methyladenosine-3'-phosphate
  modified_base 17: mod_base = OTHER; note = 2'-O-methylcytidine-3'-phosphate
  modified_base 18: mod_base = OTHER; note = 2'-O-methylguanosine-3'-phosphate
  modified_base 19: mod_base = OTHER; note = 2'-O-methylguanosine-3'-phosphate
  modified_base 20: mod_base = OTHER; note = 2'-O-methyluridine-3'-phosphate
  modified_base 21: mod_base = OTHER; note = 2'-O-methyladenosine-3'-phosphate N-[tris(GalNAc-alkyl)-amidodecanoyl)]-4-hydroxyprolinol Hyp-(GalNAc-alkyl)3 (2S,4R)-1-[29-[[2-(acetylamino)-2-deoxy-beta-D-galactopyran osyl]oxy]-14,14-bis[[3-[[3-[[5-[[2-(acetylamino)-2-deoxy-be ta-D-galactopyranosyl]oxy]-1-oxopentyl]amino]propyl]amino]- 3-oxopropoxy]methyl]-1,12,19,25-tetraoxo-16-oxa-13,20,24-tr iazanonacos-1-yl]-4-hydroxy-2-hydroxymethylpyrrolidine
atttagttcatgatcacggta

SEQ ID NO: 799 - RNA, 21 nt, synthetic construct
  source 1..21: mol_type = other RNA
  modified_base 1: mod_base = OTHER; note = 2'-O-methyladenosine-3'- phosphorothioate
  modified_base 2: mod_base = OTHER; note = 2'-O-methyluridine-3'-phosphorothioate
  modified_base 3: mod_base = OTHER; note = 2'-O-methyluridine-3'-phosphate
  modified_base 4: mod_base = OTHER; note = 2'-O-methyluridine-3'-phosphate
  modified_base 5: mod_base = OTHER; note = 2'-O-methyladenosine-3'-phosphate
  modified_base 6: mod_base = OTHER; note = 2'-O-hexadecyl-guanosine-3'-phosphate
  modified_base 7: mod_base = OTHER; note = 2'-O-methyluridine-3'-phosphate
  modified_base 8: mod_base = OTHER; note = 2'-O-methyluridine-3'-phosphate
  modified_base 9: mod_base = OTHER; note = 2'-fluorocytidine-3'-phosphate
  modified_base 10: mod_base = OTHER; note = 2'-fluoroadenosine-3'-phosphate
  modified_base 11: mod_base = OTHER; note = 2'-fluorouridine-3'-phosphate
  modified_base 12: mod_base = OTHER; note = 2'-O-methylguanosine-3'-phosphate
  modified_base 13: mod_base = OTHER; note = 2'-O-methyladenosine-3'-phosphate
  modified_base 14: mod_base = OTHER; note = 2'-O-methyluridine-3'-phosphate
  modified_base 15: mod_base = OTHER; note = 2'-O-methylcytidine-3'-phosphate
  modified_base 16: mod_base = OTHER; note = 2'-O-methyladenosine-3'-phosphate
  modified_base 17: mod_base = OTHER; note = 2'-O-methylcytidine-3'-phosphate
  modified_base 18: mod_base = OTHER; note = 2'-O-methylguanosine-3'-phosphate
  modified_base 19: mod_base = OTHER; note = 2'-O-methylguanosine-3'-phosphate
  modified_base 20: mod_base = OTHER; note = 2'-O-methyluridine-3'-phosphate
  modified_base 21: mod_base = OTHER; note = 2'-O-methyladenosine-3'-phosphate N-[tris(GalNAc-alkyl)-amidodecanoyl)]-4-hydroxyprolinol Hyp-(GalNAc-alkyl)3 (2S,4R)-1-[29-[[2-(acetylamino)-2-deoxy-beta-D-galactopyran osyl]oxy]-14,14-bis[[3-[[3-[[5-[[2-(acetylamino)-2-deoxy-be ta-D-galactopyranosyl]oxy]-1-oxopentyl]amino]propyl]amino]- 3-oxopropoxy]methyl]-1,12,19,25-tetraoxo-16-oxa-13,20,24-tr iazanonacos-1-yl]-4-hydroxy-2-hydroxymethylpyrrolidine
atttagttcatgatcacggta

SEQ ID NO: 800 - RNA, 21 nt, synthetic construct
  source 1..21: mol_type = other RNA
  modified_base 1: mod_base = OTHER; note = 2'-O-methyluridine-3'-phosphorothioate
  modified_base 2: mod_base = OTHER; note = 2'-O-methyluridine-3'-phosphorothioate
  modified_base 3: mod_base = OTHER; note = 2'-O-methyluridine-3'-phosphate
  modified_base 4: mod_base = OTHER; note = 2'-O-methyladenosine-3'-phosphate
  modified_base 5: mod_base = OTHER; note = 2'-O-methylguanosine-3'-phosphate
  modified_base 6: mod_base = OTHER; note = 2'-O-hexadecyl-uridine-3'-phosphate
  modified_base 7: mod_base = OTHER; note = 2'-fluorouridine-3'-phosphate
  modified_base 8: mod_base = OTHER; note = 2'-O-methylcytidine-3'-phosphate
  modified_base 9: mod_base = OTHER; note = 2'-fluoroadenosine-3'-phosphate
  modified_base 10: mod_base = OTHER; note = 2'-fluorouridine-3'-phosphate
  modified_base 11: mod_base = OTHER; note = 2'-fluoroguanosine-3'-phosphate
  modified_base 12: mod_base = OTHER; note = 2'-O-methyladenosine-3'-phosphate
  modified_base 13: mod_base = OTHER; note = 2'-O-methyluridine-3'-phosphate
  modified_base 14: mod_base = OTHER; note = 2'-O-methylcytidine-3'-phosphate
  modified_base 15: mod_base = OTHER; note = 2'-O-methyladenosine-3'-phosphate
  modified_base 16: mod_base = OTHER; note = 2'-O-methylcytidine-3'-phosphate
  modified_base 17: mod_base = OTHER; note = 2'-O-methylguanosine-3'-phosphate
  modified_base 18: mod_base = OTHER; note = 2'-O-methylguanosine-3'-phosphate
  modified_base 19: mod_base = OTHER; note = 2'-O-methyluridine-3'-phosphate
  modified_base 20: mod_base = OTHER; note = 2'-O-methylguanosine-3'-phosphate
  modified_base 21: mod_base = OTHER; note = 2'-O-methyladenosine-3'-phosphate N-[tris(GalNAc-alkyl)-amidodecanoyl)]-4-hydroxyprolinol Hyp-(GalNAc-alkyl)3 (2S,4R)-1-[29-[[2-(acetylamino)-2-deoxy-beta-D-galactopyran osyl]oxy]-14,14-bis[[3-[[3-[[5-[[2-(acetylamino)-2-deoxy-be ta-D-galactopyranosyl]oxy]-1-oxopentyl]amino]propyl]amino]- 3-oxopropoxy]methyl]-1,12,19,25-tetraoxo-16-oxa-13,20,24-tr iazanonacos-1-yl]-4-hydroxy-2-hydroxymethylpyrrolidine
tttagttcatgatcacggtga

SEQ ID NO: 801 - RNA, 21 nt, synthetic construct
  source 1..21: mol_type = other RNA
  modified_base 1: mod_base = OTHER; note = 2'-O-methyluridine-3'-phosphorothioate
  modified_base 2: mod_base = OTHER; note = 2'-O-methyluridine-3'-phosphorothioate
  modified_base 3: mod_base = OTHER; note = 2'-O-methyluridine-3'-phosphate
  modified_base 4: mod_base = OTHER; note = 2'-O-methyladenosine-3'-phosphate
  modified_base 5: mod_base = OTHER; note = 2'-O-methylguanosine-3'-phosphate
  modified_base 6: mod_base = OTHER; note = 2'-O-hexadecyl-uridine-3'-phosphate
  modified_base 7: mod_base = OTHER; note = 2'-O-methyluridine-3'-phosphate
  modified_base 8: mod_base = OTHER; note = 2'-O-methylcytidine-3'-phosphate
  modified_base 9: mod_base = OTHER; note = 2'-fluoroadenosine-3'-phosphate
  modified_base 10: mod_base = OTHER; note = 2'-fluorouridine-3'-phosphate
  modified_base 11: mod_base = OTHER; note = 2'-fluoroguanosine-3'-phosphate
  modified_base 12: mod_base = OTHER; note = 2'-O-methyladenosine-3'-phosphate
  modified_base 13: mod_base = OTHER; note = 2'-O-methyluridine-3'-phosphate
  modified_base 14: mod_base = OTHER; note = 2'-O-methylcytidine-3'-phosphate
  modified_base 15: mod_base = OTHER; note = 2'-O-methyladenosine-3'-phosphate
  modified_base 16: mod_base = OTHER; note = 2'-O-methylcytidine-3'-phosphate
  modified_base 17: mod_base = OTHER; note = 2'-O-methylguanosine-3'-phosphate
  modified_base 18: mod_base = OTHER; note = 2'-O-methylguanosine-3'-phosphate
  modified_base 19: mod_base = OTHER; note = 2'-O-methyluridine-3'-phosphate
  modified_base 20: mod_base = OTHER; note = 2'-O-methylguanosine-3'-phosphate
  modified_base 21: mod_base = OTHER; note = 2'-O-methyladenosine-3'-phosphate N-[tris(GalNAc-alkyl)-amidodecanoyl)]-4-hydroxyprolinol Hyp-(GalNAc-alkyl)3 (2S,4R)-1-[29-[[2-(acetylamino)-2-deoxy-beta-D-galactopyran osyl]oxy]-14,14-bis[[3-[[3-[[5-[[2-(acetylamino)-2-deoxy-be ta-D-galactopyranosyl]oxy]-1-oxopentyl]amino]propyl]amino]- 3-oxopropoxy]methyl]-1,12,19,25-tetraoxo-16-oxa-13,20,24-tr iazanonacos-1-yl]-4-hydroxy-2-hydroxymethylpyrrolidine
tttagttcatgatcacggtga

SEQ ID NO: 802 - RNA, 21 nt, synthetic construct
  source 1..21: mol_type = other RNA
  modified_base 1: mod_base = OTHER; note = 2'-O-methyluridine-3'-phosphorothioate
  modified_base 2: mod_base = OTHER; note = 2'-O-methyluridine-3'-phosphorothioate
  modified_base 3: mod_base = OTHER; note = 2'-O-methyladenosine-3'-phosphate
  modified_base 4: mod_base = OTHER; note = 2'-O-methylguanosine-3'-phosphate
  modified_base 5: mod_base = OTHER; note = 2'-O-methyluridine-3'-phosphate
  modified_base 6: mod_base = OTHER; note = 2'-O-hexadecyl-uridine-3'-phosphate
  modified_base 7: mod_base = OTHER; note = 2'-fluorocytidine-3'-phosphate
  modified_base 8: mod_base = OTHER; note = 2'-O-methyladenosine-3'-phosphate
  modified_base 9: mod_base = OTHER; note = 2'-fluorouridine-3'-phosphate
  modified_base 10: mod_base = OTHER; note = 2'-fluoroguanosine-3'-phosphate
  modified_base 11: mod_base = OTHER; note = 2'-fluoroadenosine-3'-phosphate
  modified_base 12: mod_base = OTHER; note = 2'-O-methyluridine-3'-phosphate
  modified_base 13: mod_base = OTHER; note = 2'-O-methylcytidine-3'-phosphate
  modified_base 14: mod_base = OTHER; note = 2'-O-methyladenosine-3'-phosphate
  modified_base 15: mod_base = OTHER; note = 2'-O-methylcytidine-3'-phosphate
  modified_base 16: mod_base = OTHER; note = 2'-O-methylguanosine-3'-phosphate
  modified_base 17: mod_base = OTHER; note = 2'-O-methylguanosine-3'-phosphate
  modified_base 18: mod_base = OTHER; note = 2'-O-methyluridine-3'-phosphate
  modified_base 19: mod_base = OTHER; note = 2'-O-methylguanosine-3'-phosphate
  modified_base 20: mod_base = OTHER; note = 2'-O-methylguanosine-3'-phosphate
  modified_base 21: mod_base = OTHER; note = 2'-O-methyladenosine-3'-phosphate N-[tris(GalNAc-alkyl)-amidodecanoyl)]-4-hydroxyprolinol Hyp-(GalNAc-alkyl)3 (2S,4R)-1-[29-[[2-(acetylamino)-2-deoxy-beta-D-galactopyran osyl]oxy]-14,14-bis[[3-[[3-[[5-[[2-(acetylamino)-2-deoxy-be ta-D-galactopyranosyl]oxy]-1-oxopentyl]amino]propyl]amino]- 3-oxopropoxy]methyl]-1,12,19,25-tetraoxo-16-oxa-13,20,24-tr iazanonacos-1-yl]-4-hydroxy-2-hydroxymethylpyrrolidine
ttagttcatgatcacggtgga

SEQ ID NO: 803 - RNA, 21 nt, synthetic construct
  source 1..21: mol_type = other RNA
  modified_base 1: mod_base = OTHER; note = 2'-O-methyluridine-3'-phosphorothioate
  modified_base 2: mod_base = OTHER; note = 2'-O-methyluridine-3'-phosphorothioate
  modified_base 3: mod_base = OTHER; note = 2'-O-methyladenosine-3'-phosphate
  modified_base 4: mod_base = OTHER; note = 2'-O-methylguanosine-3'-phosphate
  modified_base 5: mod_base = OTHER; note = 2'-O-methyluridine-3'-phosphate
  modified_base 6: mod_base = OTHER; note = 2'-O-hexadecyl-uridine-3'-phosphate
  modified_base 7: mod_base = OTHER; note = 2'-O-methylcytidine-3'-phosphate
  modified_base 8: mod_base = OTHER; note = 2'-O-methyladenosine-3'-phosphate
  modified_base 9: mod_base = OTHER; note = 2'-fluorouridine-3'-phosphate
  modified_base 10: mod_base = OTHER; note = 2'-fluoroguanosine-3'-phosphate
  modified_base 11: mod_base = OTHER; note = 2'-fluoroadenosine-3'-phosphate
  modified_base 12: mod_base = OTHER; note = 2'-O-methyluridine-3'-phosphate
  modified_base 13: mod_base = OTHER; note = 2'-O-methylcytidine-3'-phosphate
  modified_base 14: mod_base = OTHER; note = 2'-O-methyladenosine-3'-phosphate
  modified_base 15: mod_base = OTHER; note = 2'-O-methylcytidine-3'-phosphate
  modified_base 16: mod_base = OTHER; note = 2'-O-methylguanosine-3'-phosphate
  modified_base 17: mod_base = OTHER; note = 2'-O-methylguanosine-3'-phosphate
  modified_base 18: mod_base = OTHER; note = 2'-O-methyluridine-3'-phosphate
  modified_base 19: mod_base = OTHER; note = 2'-O-methylguanosine-3'-phosphate
  modified_base 20: mod_base = OTHER; note = 2'-O-methylguanosine-3'-phosphate
  modified_base 21: mod_base = OTHER; note = 2'-O-methyladenosine-3'-phosphate N-[tris(GalNAc-alkyl)-amidodecanoyl)]-4-hydroxyprolinol Hyp-(GalNAc-alkyl)3 (2S,4R)-1-[29-[[2-(acetylamino)-2-deoxy-beta-D-galactopyran osyl]oxy]-14,14-bis[[3-[[3-[[5-[[2-(acetylamino)-2-deoxy-be ta-D-galactopyranosyl]oxy]-1-oxopentyl]amino]propyl]amino]- 3-oxopropoxy]methyl]-1,12,19,25-tetraoxo-16-oxa-13,20,24-tr iazanonacos-1-yl]-4-hydroxy-2-hydroxymethylpyrrolidine
ttagttcatgatcacggtgga

SEQ ID NO: 804 - RNA, 21 nt, synthetic construct
  source 1..21: mol_type = other RNA
  modified_base 1: mod_base = OTHER; note = 2'-O-methyluridine-3'-phosphorothioate
  modified_base 2: mod_base = OTHER; note = 2'-O-methyladenosine-3'- phosphorothioate
  modified_base 3: mod_base = OTHER; note = 2'-O-methylguanosine-3'-phosphate
  modified_base 4: mod_base = OTHER; note = 2'-O-methyluridine-3'-phosphate
  modified_base 5: mod_base = OTHER; note = 2'-O-methyluridine-3'-phosphate
  modified_base 6: mod_base = OTHER; note = 2'-O-hexadecyl-cytidine-3'-phosphate
  modified_base 7: mod_base = OTHER; note = 2'-fluoroadenosine-3'-phosphate
  modified_base 8: mod_base = OTHER; note = 2'-O-methyluridine-3'-phosphate
  modified_base 9: mod_base = OTHER; note = 2'-fluoroguanosine-3'-phosphate
  modified_base 10: mod_base = OTHER; note = 2'-fluoroadenosine-3'-phosphate
  modified_base 11: mod_base = OTHER; note = 2'-fluorouridine-3'-phosphate
  modified_base 12: mod_base = OTHER; note = 2'-O-methylcytidine-3'-phosphate
  modified_base 13: mod_base = OTHER; note = 2'-O-methyladenosine-3'-phosphate
  modified_base 14: mod_base = OTHER; note = 2'-O-methylcytidine-3'-phosphate
  modified_base 15: mod_base = OTHER; note = 2'-O-methylguanosine-3'-phosphate
  modified_base 16: mod_base = OTHER; note = 2'-O-methylguanosine-3'-phosphate
  modified_base 17: mod_base = OTHER; note = 2'-O-methyluridine-3'-phosphate
  modified_base 18: mod_base = OTHER; note = 2'-O-methylguanosine-3'-phosphate
  modified_base 19: mod_base = OTHER; note = 2'-O-methylguanosine-3'-phosphate
  modified_base 20: mod_base = OTHER; note = 2'-O-methyluridine-3'-phosphate
  modified_base 21: mod_base = OTHER; note = 2'-O-methyladenosine-3'-phosphate N-[tris(GalNAc-alkyl)-amidodecanoyl)]-4-hydroxyprolinol Hyp-(GalNAc-alkyl)3 (2S,4R)-1-[29-[[2-(acetylamino)-2-deoxy-beta-D-galactopyran osyl]oxy]-14,14-bis[[3-[[3-[[5-[[2-(acetylamino)-2-deoxy-be ta-D-galactopyranosyl]oxy]-1-oxopentyl]amino]propyl]amino]- 3-oxopropoxy]methyl]-1,12,19,25-tetraoxo-16-oxa-13,20,24-tr iazanonacos-1-yl]-4-hydroxy-2-hydroxymethylpyrrolidine
tagttcatgatcacggtggta

SEQ ID NO: 805 - RNA, 21 nt, synthetic construct
  source 1..21: mol_type = other RNA
  modified_base 1: mod_base = OTHER; note = 2'-O-methyluridine-3'-phosphorothioate
  modified_base 2: mod_base = OTHER; note = 2'-O-methyladenosine-3'- phosphorothioate
  modified_base 3: mod_base = OTHER; note = 2'-O-methylguanosine-3'-phosphate
  modified_base 4: mod_base = OTHER; note = 2'-O-methyluridine-3'-phosphate
  modified_base 5: mod_base = OTHER; note = 2'-O-methyluridine-3'-phosphate
  modified_base 6: mod_base = OTHER; note = 2'-O-hexadecyl-cytidine-3'-phosphate
  modified_base 7: mod_base = OTHER; note = 2'-O-methyladenosine-3'-phosphate
  modified_base 8: mod_base = OTHER; note = 2'-O-methyluridine-3'-phosphate
  modified_base 9: mod_base = OTHER; note = 2'-fluoroguanosine-3'-phosphate
  modified_base 10: mod_base = OTHER; note = 2'-fluoroadenosine-3'-phosphate
  modified_base 11: mod_base = OTHER; note = 2'-fluorouridine-3'-phosphate
  modified_base 12: mod_base = OTHER; note = 2'-O-methylcytidine-3'-phosphate
  modified_base 13: mod_base = OTHER; note = 2'-O-methyladenosine-3'-phosphate
  modified_base 14: mod_base = OTHER; note = 2'-O-methylcytidine-3'-phosphate
  modified_base 15: mod_base = OTHER; note = 2'-O-methylguanosine-3'-phosphate
  modified_base 16: mod_base = OTHER; note = 2'-O-methylguanosine-3'-phosphate
  modified_base 17: mod_base = OTHER; note = 2'-O-methyluridine-3'-phosphate
  modified_base 18: mod_base = OTHER; note = 2'-O-methylguanosine-3'-phosphate
  modified_base 19: mod_base = OTHER; note = 2'-O-methylguanosine-3'-phosphate
  modified_base 20: mod_base = OTHER; note = 2'-O-methyluridine-3'-phosphate
  modified_base 21: mod_base = OTHER; note = 2'-O-methyladenosine-3'-phosphate N-[tris(GalNAc-alkyl)-amidodecanoyl)]-4-hydroxyprolinol Hyp-(GalNAc-alkyl)3 (2S,4R)-1-[29-[[2-(acetylamino)-2-deoxy-beta-D-galactopyran osyl]oxy]-14,14-bis[[3-[[3-[[5-[[2-(acetylamino)-2-deoxy-be ta-D-galactopyranosyl]oxy]-1-oxopentyl]amino]propyl]amino]- 3-oxopropoxy]methyl]-1,12,19,25-tetraoxo-16-oxa-13,20,24-tr iazanonacos-1-yl]-4-hydroxy-2-hydroxymethylpyrrolidine
tagttcatgatcacggtggta

SEQ ID NO: 806 - RNA, 21 nt, synthetic construct
  source 1..21: mol_type = other RNA
  modified_base 1: mod_base = OTHER; note = 2'-O-methyladenosine-3'- phosphorothioate
  modified_base 2: mod_base = OTHER; note = 2'-O-methylguanosine-3'- phosphorothioate
  modified_base 3: mod_base = OTHER; note = 2'-O-methyluridine-3'-phosphate
  modified_base 4: mod_base = OTHER; note = 2'-O-methyluridine-3'-phosphate
  modified_base 5: mod_base = OTHER; note = 2'-O-methylcytidine-3'-phosphate
  modified_base 6: mod_base = OTHER; note = 2'-O-hexadecyl-adenosine-3'-phosphate
  modified_base 7: mod_base = OTHER; note = 2'-fluorouridine-3'-phosphate
  modified_base 8: mod_base = OTHER; note = 2'-O-methylguanosine-3'-phosphate
  modified_base 9: mod_base = OTHER; note = 2'-fluoroadenosine-3'-phosphate
  modified_base 10: mod_base = OTHER; note = 2'-fluorouridine-3'-phosphate
  modified_base 11: mod_base = OTHER; note = 2'-fluorocytidine-3'-phosphate
  modified_base 12: mod_base = OTHER; note = 2'-O-methyladenosine-3'-phosphate
  modified_base 13: mod_base = OTHER; note = 2'-O-methylcytidine-3'-phosphate
  modified_base 14: mod_base = OTHER; note = 2'-O-methylguanosine-3'-phosphate
  modified_base 15: mod_base = OTHER; note = 2'-O-methylguanosine-3'-phosphate
  modified_base 16: mod_base = OTHER; note = 2'-O-methyluridine-3'-phosphate
  modified_base 17: mod_base = OTHER; note = 2'-O-methylguanosine-3'-phosphate
  modified_base 18: mod_base = OTHER; note = 2'-O-methylguanosine-3'-phosphate
  modified_base 19: mod_base = OTHER; note = 2'-O-methyluridine-3'-phosphate
  modified_base 20: mod_base = OTHER; note = 2'-O-methyladenosine-3'-phosphate
  modified_base 21: mod_base = OTHER; note = 2'-O-methyladenosine-3'-phosphate N-[tris(GalNAc-alkyl)-amidodecanoyl)]-4-hydroxyprolinol Hyp-(GalNAc-alkyl)3 (2S,4R)-1-[29-[[2-(acetylamino)-2-deoxy-beta-D-galactopyran osyl]oxy]-14,14-bis[[3-[[3-[[5-[[2-(acetylamino)-2-deoxy-be ta-D-galactopyranosyl]oxy]-1-oxopentyl]amino]propyl]amino]- 3-oxopropoxy]methyl]-1,12,19,25-tetraoxo-16-oxa-13,20,24-tr iazanonacos-1-yl]-4-hydroxy-2-hydroxymethylpyrrolidine
agttcatgatcacggtggtaa

SEQ ID NO: 807 - RNA, 21 nt, synthetic construct
  source 1..21: mol_type = other RNA
  modified_base 1: mod_base = OTHER; note = 2'-O-methylguanosine-3'- phosphorothioate
  modified_base 2: mod_base = OTHER; note = 2'-O-methyluridine-3'-phosphorothioate
  modified_base 3: mod_base = OTHER; note = 2'-O-methyluridine-3'-phosphate
  modified_base 4: mod_base = OTHER; note = 2'-O-methylcytidine-3'-phosphate
  modified_base 5: mod_base = OTHER; note = 2'-O-methyladenosine-3'-phosphate
  modified_base 6: mod_base = OTHER; note = 2'-O-hexadecyl-uridine-3'-phosphate
  modified_base 7: mod_base = OTHER; note = 2'-fluoroguanosine-3'-phosphate
  modified_base 8: mod_base = OTHER; note = 2'-O-methyladenosine-3'-phosphate
  modified_base 9: mod_base = OTHER; note = 2'-fluorouridine-3'-phosphate
  modified_base 10: mod_base = OTHER; note = 2'-fluorocytidine-3'-phosphate
  modified_base 11: mod_base = OTHER; note = 2'-fluoroadenosine-3'-phosphate
  modified_base 12: mod_base = OTHER; note = 2'-O-methylcytidine-3'-phosphate
  modified_base 13: mod_base = OTHER; note = 2'-O-methylguanosine-3'-phosphate
  modified_base 14: mod_base = OTHER; note = 2'-O-methylguanosine-3'-phosphate
  modified_base 15: mod_base = OTHER; note = 2'-O-methyluridine-3'-phosphate
  modified_base 16: mod_base = OTHER; note = 2'-O-methylguanosine-3'-phosphate
  modified_base 17: mod_base = OTHER; note = 2'-O-methylguanosine-3'-phosphate
  modified_base 18: mod_base = OTHER; note = 2'-O-methyluridine-3'-phosphate
  modified_base 19: mod_base = OTHER; note = 2'-O-methyladenosine-3'-phosphate
  modified_base 20: mod_base = OTHER; note = 2'-O-methylguanosine-3'-phosphate
  modified_base 21: mod_base = OTHER; note = 2'-O-methyladenosine-3'-phosphate N-[tris(GalNAc-alkyl)-amidodecanoyl)]-4-hydroxyprolinol Hyp-(GalNAc-alkyl)3 (2S,4R)-1-[29-[[2-(acetylamino)-2-deoxy-beta-D-galactopyran osyl]oxy]-14,14-bis[[3-[[3-[[5-[[2-(acetylamino)-2-deoxy-be ta-D-galactopyranosyl]oxy]-1-oxopentyl]amino]propyl]amino]- 3-oxopropoxy]methyl]-1,12,19,25-tetraoxo-16-oxa-13,20,24-tr iazanonacos-1-yl]-4-hydroxy-2-hydroxymethylpyrrolidine
gttcatgatcacggtggtaga

SEQ ID NO: 808 - RNA, 21 nt, synthetic construct
  source 1..21: mol_type = other RNA
  modified_base 1: mod_base = OTHER; note = 2'-O-methylguanosine-3'- phosphorothioate
  modified_base 2: mod_base = OTHER; note = 2'-O-methyluridine-3'-phosphorothioate
  modified_base 3: mod_base = OTHER; note = 2'-O-methyluridine-3'-phosphate
  modified_base 4: mod_base = OTHER; note = 2'-O-methylcytidine-3'-phosphate
  modified_base 5: mod_base = OTHER; note = 2'-O-methyladenosine-3'-phosphate
  modified_base 6: mod_base = OTHER; note = 2'-O-hexadecyl-uridine-3'-phosphate
  modified_base 7: mod_base = OTHER; note = 2'-O-methylguanosine-3'-phosphate
  modified_base 8: mod_base = OTHER; note = 2'-O-methyladenosine-3'-phosphate
  modified_base 9: mod_base = OTHER; note = 2'-fluorouridine-3'-phosphate
  modified_base 10: mod_base = OTHER; note = 2'-fluorocytidine-3'-phosphate
  modified_base 11: mod_base = OTHER; note = 2'-fluoroadenosine-3'-phosphate
  modified_base 12: mod_base = OTHER; note = 2'-O-methylcytidine-3'-phosphate
  modified_base 13: mod_base = OTHER; note = 2'-O-methylguanosine-3'-phosphate
  modified_base 14: mod_base = OTHER; note = 2'-O-methylguanosine-3'-phosphate
  modified_base 15: mod_base = OTHER; note = 2'-O-methyluridine-3'-phosphate
  modified_base 16: mod_base = OTHER; note = 2'-O-methylguanosine-3'-phosphate
  modified_base 17: mod_base = OTHER; note = 2'-O-methylguanosine-3'-phosphate
  modified_base 18: mod_base = OTHER; note = 2'-O-methyluridine-3'-phosphate
  modified_base 19: mod_base = OTHER; note = 2'-O-methyladenosine-3'-phosphate
  modified_base 20: mod_base = OTHER; note = 2'-O-methylguanosine-3'-phosphate
  modified_base 21: mod_base = OTHER; note = 2'-O-methyladenosine-3'-phosphate N-[tris(GalNAc-alkyl)-amidodecanoyl)]-4-hydroxyprolinol Hyp-(GalNAc-alkyl)3 (2S,4R)-1-[29-[[2-(acetylamino)-2-deoxy-beta-D-galactopyran osyl]oxy]-14,14-bis[[3-[[3-[[5-[[2-(acetylamino)-2-deoxy-be ta-D-galactopyranosyl]oxy]-1-oxopentyl]amino]propyl]amino]- 3-oxopropoxy]methyl]-1,12,19,25-tetraoxo-16-oxa-13,20,24-tr iazanonacos-1-yl]-4-hydroxy-2-hydroxymethylpyrrolidine
gttcatgatcacggtggtaga

SEQ ID NO: 809 - RNA, 21 nt, synthetic construct
  source 1..21: mol_type = other RNA
  modified_base 1: mod_base = OTHER; note = 2'-O-methylcytidine-3'- phosphorothioate
  modified_base 2: mod_base = OTHER; note = 2'-O-methyladenosine-3'- phosphorothioate
  modified_base 3: mod_base = OTHER; note = 2'-O-methyluridine-3'-phosphate
  modified_base 4: mod_base = OTHER; note = 2'-O-methylguanosine-3'-phosphate
  modified_base 5: mod_base = OTHER; note = 2'-O-methyladenosine-3'-phosphate
  modified_base 6: mod_base = OTHER; note = 2'-O-hexadecyl-uridine-3'-phosphate
  modified_base 7: mod_base = OTHER; note = 2'-fluorocytidine-3'-phosphate
  modified_base 8: mod_base = OTHER; note = 2'-O-methyladenosine-3'-phosphate
  modified_base 9: mod_base = OTHER; note = 2'-fluorocytidine-3'-phosphate
  modified_base 10: mod_base = OTHER; note = 2'-fluoroguanosine-3'-phosphate
  modified_base 11: mod_base = OTHER; note = 2'-fluoroguanosine-3'-phosphate
  modified_base 12: mod_base = OTHER; note = 2'-O-methyluridine-3'-phosphate
  modified_base 13: mod_base = OTHER; note = 2'-O-methylguanosine-3'-phosphate
  modified_base 14: mod_base = OTHER; note = 2'-O-methylguanosine-3'-phosphate
  modified_base 15: mod_base = OTHER; note = 2'-O-methyluridine-3'-phosphate
  modified_base 16: mod_base = OTHER; note = 2'-O-methyladenosine-3'-phosphate
  modified_base 17: mod_base = OTHER; note = 2'-O-methylguanosine-3'-phosphate
  modified_base 18: mod_base = OTHER; note = 2'-O-methyluridine-3'-phosphate
  modified_base 19: mod_base = OTHER; note = 2'-O-methyladenosine-3'-phosphate
  modified_base 20: mod_base = OTHER; note = 2'-O-methyladenosine-3'-phosphate
  modified_base 21: mod_base = OTHER; note = 2'-O-methyladenosine-3'-phosphate N-[tris(GalNAc-alkyl)-amidodecanoyl)]-4-hydroxyprolinol Hyp-(GalNAc-alkyl)3 (2S,4R)-1-[29-[[2-(acetylamino)-2-deoxy-beta-D-galactopyran osyl]oxy]-14,14-bis[[3-[[3-[[5-[[2-(acetylamino)-2-deoxy-be ta-D-galactopyranosyl]oxy]-1-oxopentyl]amino]propyl]amino]- 3-oxopropoxy]methyl]-1,12,19,25-tetraoxo-16-oxa-13,20,24-tr iazanonacos-1-yl]-4-hydroxy-2-hydroxymethylpyrrolidine
catgatcacggtggtagtaaa

SEQ ID NO: 810 - RNA, 21 nt, synthetic construct
  source 1..21: mol_type = other RNA
  modified_base 1: mod_base = OTHER; note = 2'-O-methyladenosine-3'- phosphorothioate
  modified_base 2: mod_base = OTHER; note = 2'-O-methyluridine-3'-phosphorothioate
  modified_base 3: mod_base = OTHER; note = 2'-O-methylguanosine-3'-phosphate
  modified_base 4: mod_base = OTHER; note = 2'-O-methyladenosine-3'-phosphate
  modified_base 5: mod_base = OTHER; note = 2'-O-methyluridine-3'-phosphate
  modified_base 6: mod_base = OTHER; note = 2'-O-hexadecyl-cytidine-3'-phosphate
  modified_base 7: mod_base = OTHER; note = 2'-fluoroadenosine-3'-phosphate
  modified_base 8: mod_base = OTHER; note = 2'-O-methylcytidine-3'-phosphate
  modified_base 9: mod_base = OTHER; note = 2'-fluoroguanosine-3'-phosphate
  modified_base 10: mod_base = OTHER; note = 2'-fluoroguanosine-3'-phosphate
  modified_base 11: mod_base = OTHER; note = 2'-fluorouridine-3'-phosphate
  modified_base 12: mod_base = OTHER; note = 2'-O-methylguanosine-3'-phosphate
  modified_base 13: mod_base = OTHER; note = 2'-O-methylguanosine-3'-phosphate
  modified_base 14: mod_base = OTHER; note = 2'-O-methyluridine-3'-phosphate
  modified_base 15: mod_base = OTHER; note = 2'-O-methyladenosine-3'-phosphate
  modified_base 16: mod_base = OTHER; note = 2'-O-methylguanosine-3'-phosphate
  modified_base 17: mod_base = OTHER; note = 2'-O-methyluridine-3'-phosphate
  modified_base 18: mod_base = OTHER; note = 2'-O-methyladenosine-3'-phosphate
  modified_base 19: mod_base = OTHER; note = 2'-O-methyladenosine-3'-phosphate
  modified_base 20: mod_base = OTHER; note = 2'-O-methylcytidine-3'-phosphate
  modified_base 21: mod_base = OTHER; note = 2'-O-methyladenosine-3'-phosphate N-[tris(GalNAc-alkyl)-amidodecanoyl)]-4-hydroxyprolinol Hyp-(GalNAc-alkyl)3 (2S,4R)-1-[29-[[2-(acetylamino)-2-deoxy-beta-D-galactopyran osyl]oxy]-14,14-bis[[3-[[3-[[5-[[2-(acetylamino)-2-deoxy-be ta-D-galactopyranosyl]oxy]-1-oxopentyl]amino]propyl]amino]- 3-oxopropoxy]methyl]-1,12,19,25-tetraoxo-16-oxa-13,20,24-tr iazanonacos-1-yl]-4-hydroxy-2-hydroxymethylpyrrolidine
atgatcacggtggtagtaaca

SEQ ID NO: 811 - RNA, 21 nt, synthetic construct
  source 1..21: mol_type = other RNA
  modified_base 1: mod_base = OTHER; note = 2'-O-methylguanosine-3'- phosphorothioate
  modified_base 2: mod_base = OTHER; note = 2'-O-methyladenosine-3'- phosphorothioate
  modified_base 3: mod_base = OTHER; note = 2'-O-methyluridine-3'-phosphate
  modified_base 4: mod_base = OTHER; note = 2'-O-methylcytidine-3'-phosphate
  modified_base 5: mod_base = OTHER; note = 2'-O-methyladenosine-3'-phosphate
  modified_base 6: mod_base = OTHER; note = 2'-O-hexadecyl-cytidine-3'-phosphate
  modified_base 7: mod_base = OTHER; note = 2'-fluoroguanosine-3'-phosphate
  modified_base 8: mod_base = OTHER; note = 2'-O-methylguanosine-3'-phosphate
  modified_base 9: mod_base = OTHER; note = 2'-fluorouridine-3'-phosphate
  modified_base 10: mod_base = OTHER; note = 2'-fluoroguanosine-3'-phosphate
  modified_base 11: mod_base = OTHER; note = 2'-fluoroguanosine-3'-phosphate
  modified_base 12: mod_base = OTHER; note = 2'-O-methyluridine-3'-phosphate
  modified_base 13: mod_base = OTHER; note = 2'-O-methyladenosine-3'-phosphate
  modified_base 14: mod_base = OTHER; note = 2'-O-methylguanosine-3'-phosphate
  modified_base 15: mod_base = OTHER; note = 2'-O-methyluridine-3'-phosphate
  modified_base 16: mod_base = OTHER; note = 2'-O-methyladenosine-3'-phosphate
  modified_base 17: mod_base = OTHER; note = 2'-O-methyladenosine-3'-phosphate
  modified_base 18: mod_base = OTHER; note = 2'-O-methylcytidine-3'-phosphate
  modified_base 19: mod_base = OTHER; note = 2'-O-methyladenosine-3'-phosphate
  modified_base 20: mod_base = OTHER; note = 2'-O-methylcytidine-3'-phosphate
  modified_base 21: mod_base = OTHER; note = 2'-O-methyladenosine-3'-phosphate N-[tris(GalNAc-alkyl)-amidodecanoyl)]-4-hydroxyprolinol Hyp-(GalNAc-alkyl)3 (2S,4R)-1-[29-[[2-(acetylamino)-2-deoxy-beta-D-galactopyran osyl]oxy]-14,14-bis[[3-[[3-[[5-[[2-(acetylamino)-2-deoxy-be ta-D-galactopyranosyl]oxy]-1-oxopentyl]amino]propyl]amino]- 3-oxopropoxy]methyl]-1,12,19,25-tetraoxo-16-oxa-13,20,24-tr iazanonacos-1-yl]-4-hydroxy-2-hydroxymethylpyrrolidine
gatcacggtggtagtaacaca

SEQ ID NO: 812 - RNA, 21 nt, synthetic construct
  source 1..21: mol_type = other RNA
  modified_base 1: mod_base = OTHER; note = 2'-O-methylguanosine-3'- phosphorothioate
  modified_base 2: mod_base = OTHER; note = 2'-O-methyladenosine-3'- phosphorothioate
  modified_base 3: mod_base = OTHER; note = 2'-O-methyluridine-3'-phosphate
  modified_base 4: mod_base = OTHER; note = 2'-O-methylcytidine-3'-phosphate
  modified_base 5: mod_base = OTHER; note = 2'-O-methyladenosine-3'-phosphate
  modified_base 6: mod_base = OTHER; note = 2'-O-hexadecyl-cytidine-3'-phosphate
  modified_base 7: mod_base = OTHER; note = 2'-O-methylguanosine-3'-phosphate
  modified_base 8: mod_base = OTHER; note = 2'-O-methylguanosine-3'-phosphate
  modified_base 9: mod_base = OTHER; note = 2'-fluorouridine-3'-phosphate
  modified_base 10: mod_base = OTHER; note = 2'-fluoroguanosine-3'-phosphate
  modified_base 11: mod_base = OTHER; note = 2'-fluoroguanosine-3'-phosphate
  modified_base 12: mod_base = OTHER; note = 2'-O-methyluridine-3'-phosphate
  modified_base 13: mod_base = OTHER; note = 2'-O-methyladenosine-3'-phosphate
  modified_base 14: mod_base = OTHER; note = 2'-O-methylguanosine-3'-phosphate
  modified_base 15: mod_base = OTHER; note = 2'-O-methyluridine-3'-phosphate
  modified_base 16: mod_base = OTHER; note = 2'-O-methyladenosine-3'-phosphate
  modified_base 17: mod_base = OTHER; note = 2'-O-methyladenosine-3'-phosphate
  modified_base 18: mod_base = OTHER; note = 2'-O-methylcytidine-3'-phosphate
  modified_base 19: mod_base = OTHER; note = 2'-O-methyladenosine-3'-phosphate
  modified_base 20: mod_base = OTHER; note = 2'-O-methylcytidine-3'-phosphate
  modified_base 21: mod_base = OTHER; note = 2'-O-methyladenosine-3'-phosphate N-[tris(GalNAc-alkyl)-amidodecanoyl)]-4-hydroxyprolinol Hyp-(GalNAc-alkyl)3 (2S,4R)-1-[29-[[2-(acetylamino)-2-deoxy-beta-D-galactopyran osyl]oxy]-14,14-bis[[3-[[3-[[5-[[2-(acetylamino)-2-deoxy-be ta-D-galactopyranosyl]oxy]-1-oxopentyl]amino]propyl]amino]- 3-oxopropoxy]methyl]-1,12,19,25-tetraoxo-16-oxa-13,20,24-tr iazanonacos-1-yl]-4-hydroxy-2-hydroxymethylpyrrolidine
gatcacggtggtagtaacaca

SEQ ID NO: 813 - RNA, 21 nt, synthetic construct
  source 1..21: mol_type = other RNA
  modified_base 1: mod_base = OTHER; note = 2'-O-methyladenosine-3'- phosphorothioate
  modified_base 2: mod_base = OTHER; note = 2'-O-methyluridine-3'-phosphorothioate
  modified_base 3: mod_base = OTHER; note = 2'-O-methylcytidine-3'-phosphate
  modified_base 4: mod_base = OTHER; note = 2'-O-methyladenosine-3'-phosphate
  modified_base 5: mod_base = OTHER; note = 2'-O-methylcytidine-3'-phosphate
  modified_base 6: mod_base = OTHER; note = 2'-O-hexadecyl-guanosine-3'-phosphate
  modified_base 7: mod_base = OTHER; note = 2'-fluoroguanosine-3'-phosphate
  modified_base 8: mod_base = OTHER; note = 2'-O-methyluridine-3'-phosphate
  modified_base 9: mod_base = OTHER; note = 2'-fluoroguanosine-3'-phosphate
  modified_base 10: mod_base = OTHER; note = 2'-fluoroguanosine-3'-phosphate
  modified_base 11: mod_base = OTHER; note = 2'-fluorouridine-3'-phosphate
  modified_base 12: mod_base = OTHER; note = 2'-O-methyladenosine-3'-phosphate
  modified_base 13: mod_base = OTHER; note = 2'-O-methylguanosine-3'-phosphate
  modified_base 14: mod_base = OTHER; note = 2'-O-methyluridine-3'-phosphate
  modified_base 15: mod_base = OTHER; note = 2'-O-methyladenosine-3'-phosphate
  modified_base 16: mod_base = OTHER; note = 2'-O-methyladenosine-3'-phosphate
  modified_base 17: mod_base = OTHER; note = 2'-O-methylcytidine-3'-phosphate
  modified_base 18: mod_base = OTHER; note = 2'-O-methyladenosine-3'-phosphate
  modified_base 19: mod_base = OTHER; note = 2'-O-methylcytidine-3'-phosphate
  modified_base 20: mod_base = OTHER; note = 2'-O-methylguanosine-3'-phosphate
  modified_base 21: mod_base = OTHER; note = 2'-O-methyladenosine-3'-phosphate N-[tris(GalNAc-alkyl)-amidodecanoyl)]-4-hydroxyprolinol Hyp-(GalNAc-alkyl)3 (2S,4R)-1-[29-[[2-(acetylamino)-2-deoxy-beta-D-galactopyran osyl]oxy]-14,14-bis[[3-[[3-[[5-[[2-(acetylamino)-2-deoxy-be ta-D-galactopyranosyl]oxy]-1-oxopentyl]amino]propyl]amino]- 3-oxopropoxy]methyl]-1,12,19,25-tetraoxo-16-oxa-13,20,24-tr iazanonacos-1-yl]-4-hydroxy-2-hydroxymethylpyrrolidine
atcacggtggtagtaacacga

SEQ ID NO: 814 - RNA, 21 nt, synthetic construct
  source 1..21: mol_type = other RNA
  modified_base 1: mod_base = OTHER; note = 2'-O-methyladenosine-3'- phosphorothioate
  modified_base 2: mod_base = OTHER; note = 2'-O-methyluridine-3'-phosphorothioate
  modified_base 3: mod_base = OTHER; note = 2'-O-methylcytidine-3'-phosphate
  modified_base 4: mod_base = OTHER; note = 2'-O-methyladenosine-3'-phosphate
  modified_base 5: mod_base = OTHER; note = 2'-O-methylcytidine-3'-phosphate
  modified_base 6: mod_base = OTHER; note = 2'-O-hexadecyl-guanosine-3'-phosphate
  modified_base 7: mod_base = OTHER; note = 2'-O-methylguanosine-3'-phosphate
  modified_base 8: mod_base = OTHER; note = 2'-O-methyluridine-3'-phosphate
  modified_base 9: mod_base = OTHER; note = 2'-fluoroguanosine-3'-phosphate
  modified_base 10: mod_base = OTHER; note = 2'-fluoroguanosine-3'-phosphate
  modified_base 11: mod_base = OTHER; note = 2'-fluorouridine-3'-phosphate
  modified_base 12: mod_base = OTHER; note = 2'-O-methyladenosine-3'-phosphate
  modified_base 13: mod_base = OTHER; note = 2'-O-methylguanosine-3'-phosphate
  modified_base 14: mod_base = OTHER; note = 2'-O-methyluridine-3'-phosphate
  modified_base 15: mod_base = OTHER; note = 2'-O-methyladenosine-3'-phosphate
  modified_base 16: mod_base = OTHER; note = 2'-O-methyladenosine-3'-phosphate
  modified_base 17: mod_base = OTHER; note = 2'-O-methylcytidine-3'-phosphate
  modified_base 18: mod_base = OTHER; note = 2'-O-methyladenosine-3'-phosphate
  modified_base 19: mod_base = OTHER; note = 2'-O-methylcytidine-3'-phosphate
  modified_base 20: mod_base = OTHER; note = 2'-O-methylguanosine-3'-phosphate
  modified_base 21: mod_base = OTHER; note = 2'-O-methyladenosine-3'-phosphate N-[tris(GalNAc-alkyl)-amidodecanoyl)]-4-hydroxyprolinol Hyp-(GalNAc-alkyl)3 (2S,4R)-1-[29-[[2-(acetylamino)-2-deoxy-beta-D-galactopyran osyl]oxy]-14,14-bis[[3-[[3-[[5-[[2-(acetylamino)-2-deoxy-be ta-D-galactopyranosyl]oxy]-1-oxopentyl]amino]propyl]amino]- 3-oxopropoxy]methyl]-1,12,19,25-tetraoxo-16-oxa-13,20,24-tr iazanonacos-1-yl]-4-hydroxy-2-hydroxymethylpyrrolidine
atcacggtggtagtaacacga

SEQ ID NO: 815 - RNA, 21 nt, synthetic construct
  source 1..21: mol_type = other RNA
  modified_base 1: mod_base = OTHER; note = 2'-O-methyluridine-3'-phosphorothioate
  modified_base 2: mod_base = OTHER; note = 2'-O-methylcytidine-3'- phosphorothioate
  modified_base 3: mod_base = OTHER; note = 2'-O-methyladenosine-3'-phosphate
  modified_base 4: mod_base = OTHER; note = 2'-O-methylcytidine-3'-phosphate
  modified_base 5: mod_base = OTHER; note = 2'-O-methylguanosine-3'-phosphate
  modified_base 6: mod_base = OTHER; note = 2'-O-hexadecyl-guanosine-3'-phosphate
  modified_base 7: mod_base = OTHER; note = 2'-fluorouridine-3'-phosphate
  modified_base 8: mod_base = OTHER; note = 2'-O-methylguanosine-3'-phosphate
  modified_base 9: mod_base = OTHER; note = 2'-fluoroguanosine-3'-phosphate
  modified_base 10: mod_base = OTHER; note = 2'-fluorouridine-3'-phosphate
  modified_base 11: mod_base = OTHER; note = 2'-fluoroadenosine-3'-phosphate
  modified_base 12: mod_base = OTHER; note = 2'-O-methylguanosine-3'-phosphate
  modified_base 13: mod_base = OTHER; note = 2'-O-methyluridine-3'-phosphate
  modified_base 14: mod_base = OTHER; note = 2'-O-methyladenosine-3'-phosphate
  modified_base 15: mod_base = OTHER; note = 2'-O-methyladenosine-3'-phosphate
  modified_base 16: mod_base = OTHER; note = 2'-O-methylcytidine-3'-phosphate
  modified_base 17: mod_base = OTHER; note = 2'-O-methyladenosine-3'-phosphate
  modified_base 18: mod_base = OTHER; note = 2'-O-methylcytidine-3'-phosphate
  modified_base 19: mod_base = OTHER; note = 2'-O-methylguanosine-3'-phosphate
  modified_base 20: mod_base = OTHER; note = 2'-O-methyladenosine-3'-phosphate
  modified_base 21: mod_base = OTHER; note = 2'-O-methyladenosine-3'-phosphate N-[tris(GalNAc-alkyl)-amidodecanoyl)]-4-hydroxyprolinol Hyp-(GalNAc-alkyl)3 (2S,4R)-1-[29-[[2-(acetylamino)-2-deoxy-beta-D-galactopyran osyl]oxy]-14,14-bis[[3-[[3-[[5-[[2-(acetylamino)-2-deoxy-be ta-D-galactopyranosyl]oxy]-1-oxopentyl]amino]propyl]amino]- 3-oxopropoxy]methyl]-1,12,19,25-tetraoxo-16-oxa-13,20,24-tr iazanonacos-1-yl]-4-hydroxy-2-hydroxymethylpyrrolidine
tcacggtggtagtaacacgaa

SEQ ID NO: 816 - RNA, 21 nt, synthetic construct
  source 1..21: mol_type = other RNA
  modified_base 1: mod_base = OTHER; note = 2'-O-methylcytidine-3'- phosphorothioate
  modified_base 2: mod_base = OTHER; note = 2'-O-methyladenosine-3'- phosphorothioate
  modified_base 3: mod_base = OTHER; note = 2'-O-methylcytidine-3'-phosphate
  modified_base 4: mod_base = OTHER; note = 2'-O-methylguanosine-3'-phosphate
  modified_base 5: mod_base = OTHER; note = 2'-O-methylguanosine-3'-phosphate
  modified_base 6: mod_base = OTHER; note = 2'-O-hexadecyl-uridine-3'-phosphate
  modified_base 7: mod_base = OTHER; note = 2'-fluoroguanosine-3'-phosphate
  modified_base 8: mod_base = OTHER; note = 2'-O-methylguanosine-3'-phosphate
  modified_base 9: mod_base = OTHER; note = 2'-fluorouridine-3'-phosphate
  modified_base 10: mod_base = OTHER; note = 2'-fluoroadenosine-3'-phosphate
  modified_base 11: mod_base = OTHER; note = 2'-fluoroguanosine-3'-phosphate
  modified_base 12: mod_base = OTHER; note = 2'-O-methyluridine-3'-phosphate
  modified_base 13: mod_base = OTHER; note = 2'-O-methyladenosine-3'-phosphate
  modified_base 14: mod_base = OTHER; note = 2'-O-methyladenosine-3'-phosphate
  modified_base 15: mod_base = OTHER; note = 2'-O-methylcytidine-3'-phosphate
  modified_base 16: mod_base = OTHER; note = 2'-O-methyladenosine-3'-phosphate
  modified_base 17: mod_base = OTHER; note = 2'-O-methylcytidine-3'-phosphate
  modified_base 18: mod_base = OTHER; note = 2'-O-methylguanosine-3'-phosphate
  modified_base 19: mod_base = OTHER; note = 2'-O-methyladenosine-3'-phosphate
  modified_base 20: mod_base = OTHER; note = 2'-O-methyluridine-3'-phosphate
  modified_base 21: mod_base = OTHER; note = 2'-O-methyladenosine-3'-phosphate N-[tris(GalNAc-alkyl)-amidodecanoyl)]-4-hydroxyprolinol Hyp-(GalNAc-alkyl)3 (2S,4R)-1-[29-[[2-(acetylamino)-2-deoxy-beta-D-galactopyran osyl]oxy]-14,14-bis[[3-[[3-[[5-[[2-(acetylamino)-2-deoxy-be ta-D-galactopyranosyl]oxy]-1-oxopentyl]amino]propyl]amino]- 3-oxopropoxy]methyl]-1,12,19,25-tetraoxo-16-oxa-13,20,24-tr iazanonacos-1-yl]-4-hydroxy-2-hydroxymethylpyrrolidine
cacggtggtagtaacacgata

SEQ ID NO: 817 - RNA, 21 nt, synthetic construct
  source 1..21: mol_type = other RNA
  modified_base 1: mod_base = OTHER; note = 2'-O-methyladenosine-3'- phosphorothioate
  modified_base 2: mod_base = OTHER; note = 2'-O-methylcytidine-3'- phosphorothioate
  modified_base 3: mod_base = OTHER; note = 2'-O-methylguanosine-3'-phosphate
  modified_base 4: mod_base = OTHER; note = 2'-O-methylguanosine-3'-phosphate
  modified_base 5: mod_base = OTHER; note = 2'-O-methyluridine-3'-phosphate
  modified_base 6: mod_base = OTHER; note = 2'-O-hexadecyl-guanosine-3'-phosphate
  modified_base 7: mod_base = OTHER; note = 2'-fluoroguanosine-3'-phosphate
  modified_base 8: mod_base = OTHER; note = 2'-O-methyluridine-3'-phosphate
  modified_base 9: mod_base = OTHER; note = 2'-fluoroadenosine-3'-phosphate
  modified_base 10: mod_base = OTHER; note = 2'-fluoroguanosine-3'-phosphate
  modified_base 11: mod_base = OTHER; note = 2'-fluorouridine-3'-phosphate
  modified_base 12: mod_base = OTHER; note = 2'-O-methyladenosine-3'-phosphate
  modified_base 13: mod_base = OTHER; note = 2'-O-methyladenosine-3'-phosphate
  modified_base 14: mod_base = OTHER; note = 2'-O-methylcytidine-3'-phosphate
  modified_base 15: mod_base = OTHER; note = 2'-O-methyladenosine-3'-phosphate
  modified_base 16: mod_base = OTHER; note = 2'-O-methylcytidine-3'-phosphate
  modified_base 17: mod_base = OTHER; note = 2'-O-methylguanosine-3'-phosphate
  modified_base 18: mod_base = OTHER; note = 2'-O-methyladenosine-3'-phosphate
  modified_base 19: mod_base = OTHER; note = 2'-O-methyluridine-3'-phosphate
  modified_base 20: mod_base = OTHER; note = 2'-O-methyluridine-3'-phosphate
  modified_base 21: mod_base = OTHER; note = 2'-O-methyladenosine-3'-phosphate N-[tris(GalNAc-alkyl)-amidodecanoyl)]-4-hydroxyprolinol Hyp-(GalNAc-alkyl)3 (2S,4R)-1-[29-[[2-(acetylamino)-2-deoxy-beta-D-galactopyran osyl]oxy]-14,14-bis[[3-[[3-[[5-[[2-(acetylamino)-2-deoxy-be ta-D-galactopyranosyl]oxy]-1-oxopentyl]amino]propyl]amino]- 3-oxopropoxy]methyl]-1,12,19,25-tetraoxo-16-oxa-13,20,24-tr iazanonacos-1-yl]-4-hydroxy-2-hydroxymethylpyrrolidine
acggtggtagtaacacgatta

SEQ ID NO: 818 - RNA, 21 nt, synthetic construct
  source 1..21: mol_type = other RNA
  modified_base 1: mod_base = OTHER; note = 2'-O-methyladenosine-3'- phosphorothioate
  modified_base 2: mod_base = OTHER; note = 2'-O-methylcytidine-3'- phosphorothioate
  modified_base 3: mod_base = OTHER; note = 2'-O-methylguanosine-3'-phosphate
  modified_base 4: mod_base = OTHER; note = 2'-O-methylguanosine-3'-phosphate
  modified_base 5: mod_base = OTHER; note = 2'-O-methyluridine-3'-phosphate
  modified_base 6: mod_base = OTHER; note = 2'-O-hexadecyl-guanosine-3'-phosphate
  modified_base 7: mod_base = OTHER; note = 2'-O-methylguanosine-3'-phosphate
  modified_base 8: mod_base = OTHER; note = 2'-O-methyluridine-3'-phosphate
  modified_base 9: mod_base = OTHER; note = 2'-fluoroadenosine-3'-phosphate
  modified_base 10: mod_base = OTHER; note = 2'-fluoroguanosine-3'-phosphate
  modified_base 11: mod_base = OTHER; note = 2'-fluorouridine-3'-phosphate
  modified_base 12: mod_base = OTHER; note = 2'-O-methyladenosine-3'-phosphate
  modified_base 13: mod_base = OTHER; note = 2'-O-methyladenosine-3'-phosphate
  modified_base 14: mod_base = OTHER; note = 2'-O-methylcytidine-3'-phosphate
  modified_base 15: mod_base = OTHER; note = 2'-O-methyladenosine-3'-phosphate
  modified_base 16: mod_base = OTHER; note = 2'-O-methylcytidine-3'-phosphate
  modified_base 17: mod_base = OTHER; note = 2'-O-methylguanosine-3'-phosphate
  modified_base 18: mod_base = OTHER; note = 2'-O-methyladenosine-3'-phosphate
  modified_base 19: mod_base = OTHER; note = 2'-O-methyluridine-3'-phosphate
  modified_base 20: mod_base = OTHER; note = 2'-O-methyluridine-3'-phosphate
  modified_base 21: mod_base = OTHER; note = 2'-O-methyladenosine-3'-phosphate N-[tris(GalNAc-alkyl)-amidodecanoyl)]-4-hydroxyprolinol Hyp-(GalNAc-alkyl)3 (2S,4R)-1-[29-[[2-(acetylamino)-2-deoxy-beta-D-galactopyran osyl]oxy]-14,14-bis[[3-[[3-[[5-[[2-(acetylamino)-2-deoxy-be ta-D-galactopyranosyl]oxy]-1-oxopentyl]amino]propyl]amino]- 3-oxopropoxy]methyl]-1,12,19,25-tetraoxo-16-oxa-13,20,24-tr iazanonacos-1-yl]-4-hydroxy-2-hydroxymethylpyrrolidine
acggtggtagtaacacgatta

SEQ ID NO: 819 - RNA, 21 nt, synthetic construct
  source 1..21: mol_type = other RNA
  modified_base 1: mod_base = OTHER; note = 2'-O-methylguanosine-3'- phosphorothioate
  modified_base 2: mod_base = OTHER; note = 2'-O-methylcytidine-3'- phosphorothioate
  modified_base 3: mod_base = OTHER; note = 2'-O-methyladenosine-3'-phosphate
  modified_base 4: mod_base = OTHER; note = 2'-O-methylcytidine-3'-phosphate
  modified_base 5: mod_base = OTHER; note = 2'-O-methylcytidine-3'-phosphate
  modified_base 6: mod_base = OTHER; note = 2'-O-hexadecyl-adenosine-3'-phosphate
  modified_base 7: mod_base = OTHER; note = 2'-fluorocytidine-3'-phosphate
  modified_base 8: mod_base = OTHER; note = 2'-O-methylcytidine-3'-phosphate
  modified_base 9: mod_base = OTHER; note = 2'-fluorouridine-3'-phosphate
  modified_base 10: mod_base = OTHER; note = 2'-fluoroadenosine-3'-phosphate
  modified_base 11: mod_base = OTHER; note = 2'-fluoroadenosine-3'-phosphate
  modified_base 12: mod_base = OTHER; note = 2'-O-methylguanosine-3'-phosphate
  modified_base 13: mod_base = OTHER; note = 2'-O-methyladenosine-3'-phosphate
  modified_base 14: mod_base = OTHER; note = 2'-O-methylguanosine-3'-phosphate
  modified_base 15: mod_base = OTHER; note = 2'-O-methyladenosine-3'-phosphate
  modified_base 16: mod_base = OTHER; note = 2'-O-methyluridine-3'-phosphate
  modified_base 17: mod_base = OTHER; note = 2'-O-methylcytidine-3'-phosphate
  modified_base 18: mod_base = OTHER; note = 2'-O-methyluridine-3'-phosphate
  modified_base 19: mod_base = OTHER; note = 2'-O-methylguanosine-3'-phosphate
  modified_base 20: mod_base = OTHER; note = 2'-O-methylcytidine-3'-phosphate
  modified_base 21: mod_base = OTHER; note = 2'-O-methyladenosine-3'-phosphate N-[tris(GalNAc-alkyl)-amidodecanoyl)]-4-hydroxyprolinol Hyp-(GalNAc-alkyl)3 (2S,4R)-1-[29-[[2-(acetylamino)-2-deoxy-beta-D-galactopyran osyl]oxy]-14,14-bis[[3-[[3-[[5-[[2-(acetylamino)-2-deoxy-be ta-D-galactopyranosyl]oxy]-1-oxopentyl]amino]propyl]amino]- 3-oxopropoxy]methyl]-1,12,19,25-tetraoxo-16-oxa-13,20,24-tr iazanonacos-1-yl]-4-hydroxy-2-hydroxymethylpyrrolidine
gcaccacctaagagatctgca

SEQ ID NO: 820 - RNA, 21 nt, synthetic construct
  source 1..21: mol_type = other RNA
  modified_base 1: mod_base = OTHER; note = 2'-O-methylcytidine-3'- phosphorothioate
  modified_base 2: mod_base = OTHER; note = 2'-O-methyladenosine-3'- phosphorothioate
  modified_base 3: mod_base = OTHER; note = 2'-O-methylcytidine-3'-phosphate
  modified_base 4: mod_base = OTHER; note = 2'-O-methylcytidine-3'-phosphate
  modified_base 5: mod_base = OTHER; note = 2'-O-methyladenosine-3'-phosphate
  modified_base 6: mod_base = OTHER; note = 2'-O-hexadecyl-cytidine-3'-phosphate
  modified_base 7: mod_base = OTHER; note = 2'-fluorocytidine-3'-phosphate
  modified_base 8: mod_base = OTHER; note = 2'-O-methyluridine-3'-phosphate
  modified_base 9: mod_base = OTHER; note = 2'-fluoroadenosine-3'-phosphate
  modified_base 10: mod_base = OTHER; note = 2'-fluoroadenosine-3'-phosphate
  modified_base 11: mod_base = OTHER; note = 2'-fluoroguanosine-3'-phosphate
  modified_base 12: mod_base = OTHER; note = 2'-O-methyladenosine-3'-phosphate
  modified_base 13: mod_base = OTHER; note = 2'-O-methylguanosine-3'-phosphate
  modified_base 14: mod_base = OTHER; note = 2'-O-methyladenosine-3'-phosphate
  modified_base 15: mod_base = OTHER; note = 2'-O-methyluridine-3'-phosphate
  modified_base 16: mod_base = OTHER; note = 2'-O-methylcytidine-3'-phosphate
  modified_base 17: mod_base = OTHER; note = 2'-O-methyluridine-3'-phosphate
  modified_base 18: mod_base = OTHER; note = 2'-O-methylguanosine-3'-phosphate
  modified_base 19: mod_base = OTHER; note = 2'-O-methylcytidine-3'-phosphate
  modified_base 20: mod_base = OTHER; note = 2'-O-methyluridine-3'-phosphate
  modified_base 21: mod_base = OTHER; note = 2'-O-methyladenosine-3'-phosphate N-[tris(GalNAc-alkyl)-amidodecanoyl)]-4-hydroxyprolinol Hyp-(GalNAc-alkyl)3 (2S,4R)-1-[29-[[2-(acetylamino)-2-deoxy-beta-D-galactopyran osyl]oxy]-14,14-bis[[3-[[3-[[5-[[2-(acetylamino)-2-deoxy-be ta-D-galactopyranosyl]oxy]-1-oxopentyl]amino]propyl]amino]- 3-oxopropoxy]methyl]-1,12,19,25-tetraoxo-16-oxa-13,20,24-tr iazanonacos-1-yl]-4-hydroxy-2-hydroxymethylpyrrolidine
caccacctaagagatctgcta

SEQ ID NO: 821 - RNA, 21 nt, synthetic construct
  source 1..21: mol_type = other RNA
  modified_base 1: mod_base = OTHER; note = 2'-O-methylcytidine-3'- phosphorothioate
  modified_base 2: mod_base = OTHER; note = 2'-O-methylcytidine-3'- phosphorothioate
  modified_base 3: mod_base = OTHER; note = 2'-O-methyladenosine-3'-phosphate
  modified_base 4: mod_base = OTHER; note = 2'-O-methylcytidine-3'-phosphate
  modified_base 5: mod_base = OTHER; note = 2'-O-methylcytidine-3'-phosphate
  modified_base 6: mod_base = OTHER; note = 2'-O-hexadecyl-uridine-3'-phosphate
  modified_base 7: mod_base = OTHER; note = 2'-fluoroadenosine-3'-phosphate
  modified_base 8: mod_base = OTHER; note = 2'-O-methyladenosine-3'-phosphate
  modified_base 9: mod_base = OTHER; note = 2'-fluoroguanosine-3'-phosphate
  modified_base 10: mod_base = OTHER; note = 2'-fluoroadenosine-3'-phosphate
  modified_base 11: mod_base = OTHER; note = 2'-fluoroguanosine-3'-phosphate
  modified_base 12: mod_base = OTHER; note = 2'-O-methyladenosine-3'-phosphate
  modified_base 13: mod_base = OTHER; note = 2'-O-methyluridine-3'-phosphate
  modified_base 14: mod_base = OTHER; note = 2'-O-methylcytidine-3'-phosphate
  modified_base 15: mod_base = OTHER; note = 2'-O-methyluridine-3'-phosphate
  modified_base 16: mod_base = OTHER; note = 2'-O-methylguanosine-3'-phosphate
  modified_base 17: mod_base = OTHER; note = 2'-O-methylcytidine-3'-phosphate
  modified_base 18: mod_base = OTHER; note = 2'-O-methyluridine-3'-phosphate
  modified_base 19: mod_base = OTHER; note = 2'-O-methylcytidine-3'-phosphate
  modified_base 20: mod_base = OTHER; note = 2'-O-methyladenosine-3'-phosphate
  modified_base 21: mod_base = OTHER; note = 2'-O-methyladenosine-3'-phosphate N-[tris(GalNAc-alkyl)-amidodecanoyl)]-4-hydroxyprolinol Hyp-(GalNAc-alkyl)3 (2S,4R)-1-[29-[[2-(acetylamino)-2-deoxy-beta-D-galactopyran osyl]oxy]-14,14-bis[[3-[[3-[[5-[[2-(acetylamino)-2-deoxy-be ta-D-galactopyranosyl]oxy]-1-oxopentyl]amino]propyl]amino]- 3-oxopropoxy]methyl]-1,12,19,25-tetraoxo-16-oxa-13,20,24-tr iazanonacos-1-yl]-4-hydroxy-2-hydroxymethylpyrrolidine
ccacctaagagatctgctcaa

SEQ ID NO: 822 - RNA, 21 nt, synthetic construct
  source 1..21: mol_type = other RNA
  modified_base 1: mod_base = OTHER; note = 2'-O-methylcytidine-3'- phosphorothioate
  modified_base 2: mod_base = OTHER; note = 2'-O-methylcytidine-3'- phosphorothioate
  modified_base 3: mod_base = OTHER; note = 2'-O-methyluridine-3'-phosphate
  modified_base 4: mod_base = OTHER; note = 2'-O-methyladenosine-3'-phosphate
  modified_base 5: mod_base = OTHER; note = 2'-O-methyladenosine-3'-phosphate
  modified_base 6: mod_base = OTHER; note = 2'-O-hexadecyl-guanosine-3'-phosphate
  modified_base 7: mod_base = OTHER; note = 2'-fluoroadenosine-3'-phosphate
  modified_base 8: mod_base = OTHER; note = 2'-O-methylguanosine-3'-phosphate
  modified_base 9: mod_base = OTHER; note = 2'-fluoroadenosine-3'-phosphate
  modified_base 10: mod_base = OTHER; note = 2'-fluorouridine-3'-phosphate
  modified_base 11: mod_base = OTHER; note = 2'-fluorocytidine-3'-phosphate
  modified_base 12: mod_base = OTHER; note = 2'-O-methyluridine-3'-phosphate
  modified_base 13: mod_base = OTHER; note = 2'-O-methylguanosine-3'-phosphate
  modified_base 14: mod_base = OTHER; note = 2'-O-methylcytidine-3'-phosphate
  modified_base 15: mod_base = OTHER; note = 2'-O-methyluridine-3'-phosphate
  modified_base 16: mod_base = OTHER; note = 2'-O-methylcytidine-3'-phosphate
  modified_base 17: mod_base = OTHER; note = 2'-O-methyladenosine-3'-phosphate
  modified_base 18: mod_base = OTHER; note = 2'-O-methyluridine-3'-phosphate
  modified_base 19: mod_base = OTHER; note = 2'-O-methylcytidine-3'-phosphate
  modified_base 20: mod_base = OTHER; note = 2'-O-methyluridine-3'-phosphate
  modified_base 21: mod_base = OTHER; note = 2'-O-methyladenosine-3'-phosphate N-[tris(GalNAc-alkyl)-amidodecanoyl)]-4-hydroxyprolinol Hyp-(GalNAc-alkyl)3 (2S,4R)-1-[29-[[2-(acetylamino)-2-deoxy-beta-D-galactopyran osyl]oxy]-14,14-bis[[3-[[3-[[5-[[2-(acetylamino)-2-deoxy-be ta-D-galactopyranosyl]oxy]-1-oxopentyl]amino]propyl]amino]- 3-oxopropoxy]methyl]-1,12,19,25-tetraoxo-16-oxa-13,20,24-tr iazanonacos-1-yl]-4-hydroxy-2-hydroxymethylpyrrolidine
cctaagagatctgctcatcta

SEQ ID NO: 823 - RNA, 21 nt, synthetic construct
  source 1..21: mol_type = other RNA
  modified_base 1: mod_base = OTHER; note = 2'-O-methyluridine-3'-phosphorothioate
  modified_base 2: mod_base = OTHER; note = 2'-O-methyladenosine-3'- phosphorothioate
  modified_base 3: mod_base = OTHER; note = 2'-O-methyladenosine-3'-phosphate
  modified_base 4: mod_base = OTHER; note = 2'-O-methylguanosine-3'-phosphate
  modified_base 5: mod_base = OTHER; note = 2'-O-methyladenosine-3'-phosphate
  modified_base 6: mod_base = OTHER; note = 2'-O-hexadecyl-guanosine-3'-phosphate
  modified_base 7: mod_base = OTHER; note = 2'-fluoroadenosine-3'-phosphate
  modified_base 8: mod_base = OTHER; note = 2'-O-methyluridine-3'-phosphate
  modified_base 9: mod_base = OTHER; note = 2'-fluorocytidine-3'-phosphate
  modified_base 10: mod_base = OTHER; note = 2'-fluorouridine-3'-phosphate
  modified_base 11: mod_base = OTHER; note = 2'-fluoroguanosine-3'-phosphate
  modified_base 12: mod_base = OTHER; note = 2'-O-methylcytidine-3'-phosphate
  modified_base 13: mod_base = OTHER; note = 2'-O-methyluridine-3'-phosphate
  modified_base 14: mod_base = OTHER; note = 2'-O-methylcytidine-3'-phosphate
  modified_base 15: mod_base = OTHER; note = 2'-O-methyladenosine-3'-phosphate
  modified_base 16: mod_base = OTHER; note = 2'-O-methyluridine-3'-phosphate
  modified_base 17: mod_base = OTHER; note = 2'-O-methylcytidine-3'-phosphate
  modified_base 18: mod_base = OTHER; note = 2'-O-methyluridine-3'-phosphate
  modified_base 19: mod_base = OTHER; note = 2'-O-methyladenosine-3'-phosphate
  modified_base 20: mod_base = OTHER; note = 2'-O-methyladenosine-3'-phosphate
  modified_base 21: mod_base = OTHER; note = 2'-O-methyladenosine-3'-phosphate N-[tris(GalNAc-alkyl)-amidodecanoyl)]-4-hydroxyprolinol Hyp-(GalNAc-alkyl)3 (2S,4R)-1-[29-[[2-(acetylamino)-2-deoxy-beta-D-galactopyran osyl]oxy]-14,14-bis[[3-[[3-[[5-[[2-(acetylamino)-2-deoxy-be ta-D-galactopyranosyl]oxy]-1-oxopentyl]amino]propyl]amino]- 3-oxopropoxy]methyl]-1,12,19,25-tetraoxo-16-oxa-13,20,24-tr iazanonacos-1-yl]-4-hydroxy-2-hydroxymethylpyrrolidine
taagagatctgctcatctaaa

SEQ ID NO: 824 - RNA, 21 nt, synthetic construct
  source 1..21: mol_type = other RNA
  modified_base 1: mod_base = OTHER; note = 2'-O-methyladenosine-3'- phosphorothioate
  modified_base 2: mod_base = OTHER; note = 2'-O-methyladenosine-3'- phosphorothioate
  modified_base 3: mod_base = OTHER; note = 2'-O-methylguanosine-3'-phosphate
  modified_base 4: mod_base = OTHER; note = 2'-O-methyladenosine-3'-phosphate
  modified_base 5: mod_base = OTHER; note = 2'-O-methylguanosine-3'-phosphate
  modified_base 6: mod_base = OTHER; note = 2'-O-hexadecyl-adenosine-3'-phosphate
  modified_base 7: mod_base = OTHER; note = 2'-fluorouridine-3'-phosphate
  modified_base 8: mod_base = OTHER; note = 2'-O-methylcytidine-3'-phosphate
  modified_base 9: mod_base = OTHER; note = 2'-fluorouridine-3'-phosphate
  modified_base 10: mod_base = OTHER; note = 2'-fluoroguanosine-3'-phosphate
  modified_base 11: mod_base = OTHER; note = 2'-fluorocytidine-3'-phosphate
  modified_base 12: mod_base = OTHER; note = 2'-O-methyluridine-3'-phosphate
  modified_base 13: mod_base = OTHER; note = 2'-O-methylcytidine-3'-phosphate
  modified_base 14: mod_base = OTHER; note = 2'-O-methyladenosine-3'-phosphate
  modified_base 15: mod_base = OTHER; note = 2'-O-methyluridine-3'-phosphate
  modified_base 16: mod_base = OTHER; note = 2'-O-methylcytidine-3'-phosphate
  modified_base 17: mod_base = OTHER; note = 2'-O-methyluridine-3'-phosphate
  modified_base 18: mod_base = OTHER; note = 2'-O-methyladenosine-3'-phosphate
  modified_base 19: mod_base = OTHER; note = 2'-O-methyladenosine-3'-phosphate
  modified_base 20: mod_base = OTHER; note = 2'-O-methylguanosine-3'-phosphate
  modified_base 21: mod_base = OTHER; note = 2'-O-methyladenosine-3'-phosphate N-[tris(GalNAc-alkyl)-amidodecanoyl)]-4-hydroxyprolinol Hyp-(GalNAc-alkyl)3 (2S,4R)-1-[29-[[2-(acetylamino)-2-deoxy-beta-D-galactopyran osyl]oxy]-14,14-bis[[3-[[3-[[5-[[2-(acetylamino)-2-deoxy-be ta-D-galactopyranosyl]oxy]-1-oxopentyl]amino]propyl]amino]- 3-oxopropoxy]methyl]-1,12,19,25-tetraoxo-16-oxa-13,20,24-tr iazanonacos-1-yl]-4-hydroxy-2-hydroxymethylpyrrolidine
aagagatctgctcatctaaga

SEQ ID NO: 825 - RNA, 21 nt, synthetic construct
  source 1..21: mol_type = other RNA
  modified_base 1: mod_base = OTHER; note = 2'-O-methyladenosine-3'- phosphorothioate
  modified_base 2: mod_base = OTHER; note = 2'-O-methyladenosine-3'- phosphorothioate
  modified_base 3: mod_base = OTHER; note = 2'-O-methylguanosine-3'-phosphate
  modified_base 4: mod_base = OTHER; note = 2'-O-methyladenosine-3'-phosphate
  modified_base 5: mod_base = OTHER; note = 2'-O-methylguanosine-3'-phosphate
  modified_base 6: mod_base = OTHER; note = 2'-O-hexadecyl-adenosine-3'-phosphate
  modified_base 7: mod_base = OTHER; note = 2'-O-methyluridine-3'-phosphate
  modified_base 8: mod_base = OTHER; note = 2'-O-methylcytidine-3'-phosphate
  modified_base 9: mod_base = OTHER; note = 2'-fluorouridine-3'-phosphate
  modified_base 10: mod_base = OTHER; note = 2'-fluoroguanosine-3'-phosphate
  modified_base 11: mod_base = OTHER; note = 2'-fluorocytidine-3'-phosphate
  modified_base 12: mod_base = OTHER; note = 2'-O-methyluridine-3'-phosphate
  modified_base 13: mod_base = OTHER; note = 2'-O-methylcytidine-3'-phosphate
  modified_base 14: mod_base = OTHER; note = 2'-O-methyladenosine-3'-phosphate
  modified_base 15: mod_base = OTHER; note = 2'-O-methyluridine-3'-phosphate
  modified_base 16: mod_base = OTHER; note = 2'-O-methylcytidine-3'-phosphate
  modified_base 17: mod_base = OTHER; note = 2'-O-methyluridine-3'-phosphate
  modified_base 18: mod_base = OTHER; note = 2'-O-methyladenosine-3'-phosphate
  modified_base 19: mod_base = OTHER; note = 2'-O-methyladenosine-3'-phosphate
  modified_base 20: mod_base = OTHER; note = 2'-O-methylguanosine-3'-phosphate
  modified_base 21: mod_base = OTHER; note = 2'-O-methyladenosine-3'-phosphate N-[tris(GalNAc-alkyl)-amidodecanoyl)]-4-hydroxyprolinol Hyp-(GalNAc-alkyl)3 (2S,4R)-1-[29-[[2-(acetylamino)-2-deoxy-beta-D-galactopyran osyl]oxy]-14,14-bis[[3-[[3-[[5-[[2-(acetylamino)-2-deoxy-be ta-D-galactopyranosyl]oxy]-1-oxopentyl]amino]propyl]amino]- 3-oxopropoxy]methyl]-1,12,19,25-tetraoxo-16-oxa-13,20,24-tr iazanonacos-1-yl]-4-hydroxy-2-hydroxymethylpyrrolidine
aagagatctgctcatctaaga

SEQ ID NO: 826 - RNA, 21 nt, synthetic construct
  source 1..21: mol_type = other RNA
  modified_base 1: mod_base = OTHER; note = 2'-O-methyladenosine-3'- phosphorothioate
  modified_base 2: mod_base = OTHER; note = 2'-O-methylguanosine-3'- phosphorothioate
  modified_base 3: mod_base = OTHER; note = 2'-O-methyladenosine-3'-phosphate
  modified_base 4: mod_base = OTHER; note = 2'-O-methylguanosine-3'-phosphate
  modified_base 5: mod_base = OTHER; note = 2'-O-methyladenosine-3'-phosphate
  modified_base 6: mod_base = OTHER; note = 2'-O-hexadecyl-uridine-3'-phosphate
  modified_base 7: mod_base = OTHER; note = 2'-fluorocytidine-3'-phosphate
  modified_base 8: mod_base = OTHER; note = 2'-O-methyluridine-3'-phosphate
  modified_base 9: mod_base = OTHER; note = 2'-fluoroguanosine-3'-phosphate
  modified_base 10: mod_base = OTHER; note = 2'-fluorocytidine-3'-phosphate
  modified_base 11: mod_base = OTHER; note = 2'-fluorouridine-3'-phosphate
  modified_base 12: mod_base = OTHER; note = 2'-O-methylcytidine-3'-phosphate
  modified_base 13: mod_base = OTHER; note = 2'-O-methyladenosine-3'-phosphate
  modified_base 14: mod_base = OTHER; note = 2'-O-methyluridine-3'-phosphate
  modified_base 15: mod_base = OTHER; note = 2'-O-methylcytidine-3'-phosphate
  modified_base 16: mod_base = OTHER; note = 2'-O-methyluridine-3'-phosphate
  modified_base 17: mod_base = OTHER; note = 2'-O-methyladenosine-3'-phosphate
  modified_base 18: mod_base = OTHER; note = 2'-O-methyladenosine-3'-phosphate
  modified_base 19: mod_base = OTHER; note = 2'-O-methylguanosine-3'-phosphate
  modified_base 20: mod_base = OTHER; note = 2'-O-methylcytidine-3'-phosphate
  modified_base 21: mod_base = OTHER; note = 2'-O-methyladenosine-3'-phosphate N-[tris(GalNAc-alkyl)-amidodecanoyl)]-4-hydroxyprolinol Hyp-(GalNAc-alkyl)3 (2S,4R)-1-[29-[[2-(acetylamino)-2-deoxy-beta-D-galactopyran osyl]oxy]-14,14-bis[[3-[[3-[[5-[[2-(acetylamino)-2-deoxy-be ta-D-galactopyranosyl]oxy]-1-oxopentyl]amino]propyl]amino]- 3-oxopropoxy]methyl]-1,12,19,25-tetraoxo-16-oxa-13,20,24-tr iazanonacos-1-yl]-4-hydroxy-2-hydroxymethylpyrrolidine
agagatctgctcatctaagca

SEQ ID NO: 827 - RNA, 21 nt, synthetic construct
  source 1..21: mol_type = other RNA
  modified_base 1: mod_base = OTHER; note = 2'-O-methyladenosine-3'- phosphorothioate
  modified_base 2: mod_base = OTHER; note = 2'-O-methylguanosine-3'- phosphorothioate
  modified_base 3: mod_base = OTHER; note = 2'-O-methyladenosine-3'-phosphate
  modified_base 4: mod_base = OTHER; note = 2'-O-methylguanosine-3'-phosphate
  modified_base 5: mod_base = OTHER; note = 2'-O-methyladenosine-3'-phosphate
  modified_base 6: mod_base = OTHER; note = 2'-O-hexadecyl-uridine-3'-phosphate
  modified_base 7: mod_base = OTHER; note = 2'-O-methylcytidine-3'-phosphate
  modified_base 8: mod_base = OTHER; note = 2'-O-methyluridine-3'-phosphate
  modified_base 9: mod_base = OTHER; note = 2'-fluoroguanosine-3'-phosphate
  modified_base 10: mod_base = OTHER; note = 2'-fluorocytidine-3'-phosphate
  modified_base 11: mod_base = OTHER; note = 2'-fluorouridine-3'-phosphate
  modified_base 12: mod_base = OTHER; note = 2'-O-methylcytidine-3'-phosphate
  modified_base 13: mod_base = OTHER; note = 2'-O-methyladenosine-3'-phosphate
  modified_base 14: mod_base = OTHER; note = 2'-O-methyluridine-3'-phosphate
  modified_base 15: mod_base = OTHER; note = 2'-O-methylcytidine-3'-phosphate
  modified_base 16: mod_base = OTHER; note = 2'-O-methyluridine-3'-phosphate
  modified_base 17: mod_base = OTHER; note = 2'-O-methyladenosine-3'-phosphate
  modified_base 18: mod_base = OTHER; note = 2'-O-methyladenosine-3'-phosphate
  modified_base 19: mod_base = OTHER; note = 2'-O-methylguanosine-3'-phosphate
  modified_base 20: mod_base = OTHER; note = 2'-O-methylcytidine-3'-phosphate
  modified_base 21: mod_base = OTHER; note = 2'-O-methyladenosine-3'-phosphate N-[tris(GalNAc-alkyl)-amidodecanoyl)]-4-hydroxyprolinol Hyp-(GalNAc-alkyl)3 (2S,4R)-1-[29-[[2-(acetylamino)-2-deoxy-beta-D-galactopyran osyl]oxy]-14,14-bis[[3-[[3-[[5-[[2-(acetylamino)-2-deoxy-be ta-D-galactopyranosyl]oxy]-1-oxopentyl]amino]propyl]amino]- 3-oxopropoxy]methyl]-1,12,19,25-tetraoxo-16-oxa-13,20,24-tr iazanonacos-1-yl]-4-hydroxy-2-hydroxymethylpyrrolidine
agagatctgctcatctaagca

SEQ ID NO: 828 - RNA, 21 nt, synthetic construct
  source 1..21: mol_type = other RNA
  modified_base 1: mod_base = OTHER; note = 2'-O-methylguanosine-3'- phosphorothioate
  modified_base 2: mod_base = OTHER; note = 2'-O-methyladenosine-3'- phosphorothioate
  modified_base 3: mod_base = OTHER; note = 2'-O-methylguanosine-3'-phosphate
  modified_base 4: mod_base = OTHER; note = 2'-O-methyladenosine-3'-phosphate
  modified_base 5: mod_base = OTHER; note = 2'-O-methyluridine-3'-phosphate
  modified_base 6: mod_base = OTHER; note = 2'-O-hexadecyl-cytidine-3'-phosphate
  modified_base 7: mod_base = OTHER; note = 2'-fluorouridine-3'-phosphate
  modified_base 8: mod_base = OTHER; note = 2'-O-methylguanosine-3'-phosphate
  modified_base 9: mod_base = OTHER; note = 2'-fluorocytidine-3'-phosphate
  modified_base 10: mod_base = OTHER; note = 2'-fluorouridine-3'-phosphate
  modified_base 11: mod_base = OTHER; note = 2'-fluorocytidine-3'-phosphate
  modified_base 12: mod_base = OTHER; note = 2'-O-methyladenosine-3'-phosphate
  modified_base 13: mod_base = OTHER; note = 2'-O-methyluridine-3'-phosphate
  modified_base 14: mod_base = OTHER; note = 2'-O-methylcytidine-3'-phosphate
  modified_base 15: mod_base = OTHER; note = 2'-O-methyluridine-3'-phosphate
  modified_base 16: mod_base = OTHER; note = 2'-O-methyladenosine-3'-phosphate
  modified_base 17: mod_base = OTHER; note = 2'-O-methyladenosine-3'-phosphate
  modified_base 18: mod_base = OTHER; note = 2'-O-methylguanosine-3'-phosphate
  modified_base 19: mod_base = OTHER; note = 2'-O-methylcytidine-3'-phosphate
  modified_base 20: mod_base = OTHER; note = 2'-O-methylcytidine-3'-phosphate
  modified_base 21: mod_base = OTHER; note = 2'-O-methyladenosine-3'-phosphate N-[tris(GalNAc-alkyl)-amidodecanoyl)]-4-hydroxyprolinol Hyp-(GalNAc-alkyl)3 (2S,4R)-1-[29-[[2-(acetylamino)-2-deoxy-beta-D-galactopyran osyl]oxy]-14,14-bis[[3-[[3-[[5-[[2-(acetylamino)-2-deoxy-be ta-D-galactopyranosyl]oxy]-1-oxopentyl]amino]propyl]amino]- 3-oxopropoxy]methyl]-1,12,19,25-tetraoxo-16-oxa-13,20,24-tr iazanonacos-1-yl]-4-hydroxy-2-hydroxymethylpyrrolidine
gagatctgctcatctaagcca

SEQ ID NO: 829 - RNA, 21 nt, synthetic construct
  source 1..21: mol_type = other RNA
  modified_base 1: mod_base = OTHER; note = 2'-O-methyladenosine-3'- phosphorothioate
  modified_base 2: mod_base = OTHER; note = 2'-O-methylguanosine-3'- phosphorothioate
  modified_base 3: mod_base = OTHER; note = 2'-O-methyladenosine-3'-phosphate
  modified_base 4: mod_base = OTHER; note = 2'-O-methyluridine-3'-phosphate
  modified_base 5: mod_base = OTHER; note = 2'-O-methylcytidine-3'-phosphate
  modified_base 6: mod_base = OTHER; note = 2'-O-hexadecyl-uridine-3'-phosphate
  modified_base 7: mod_base = OTHER; note = 2'-fluoroguanosine-3'-phosphate
  modified_base 8: mod_base = OTHER; note = 2'-O-methylcytidine-3'-phosphate
  modified_base 9: mod_base = OTHER; note = 2'-fluorouridine-3'-phosphate
  modified_base 10: mod_base = OTHER; note = 2'-fluorocytidine-3'-phosphate
  modified_base 11: mod_base = OTHER; note = 2'-fluoroadenosine-3'-phosphate
  modified_base 12: mod_base = OTHER; note = 2'-O-methyluridine-3'-phosphate
  modified_base 13: mod_base = OTHER; note = 2'-O-methylcytidine-3'-phosphate
  modified_base 14: mod_base = OTHER; note = 2'-O-methyluridine-3'-phosphate
  modified_base 15: mod_base = OTHER; note = 2'-O-methyladenosine-3'-phosphate
  modified_base 16: mod_base = OTHER; note = 2'-O-methyladenosine-3'-phosphate
  modified_base 17: mod_base = OTHER; note = 2'-O-methylguanosine-3'-phosphate
  modified_base 18: mod_base = OTHER; note = 2'-O-methylcytidine-3'-phosphate
  modified_base 19: mod_base = OTHER; note = 2'-O-methylcytidine-3'-phosphate
  modified_base 20: mod_base = OTHER; note = 2'-O-methyluridine-3'-phosphate
  modified_base 21: mod_base = OTHER; note = 2'-O-methyladenosine-3'-phosphate N-[tris(GalNAc-alkyl)-amidodecanoyl)]-4-hydroxyprolinol Hyp-(GalNAc-alkyl)3 (2S,4R)-1-[29-[[2-(acetylamino)-2-deoxy-beta-D-galactopyran osyl]oxy]-14,14-bis[[3-[[3-[[5-[[2-(acetylamino)-2-deoxy-be ta-D-galactopyranosyl]oxy]-1-oxopentyl]amino]propyl]amino]- 3-oxopropoxy]methyl]-1,12,19,25-tetraoxo-16-oxa-13,20,24-tr iazanonacos-1-yl]-4-hydroxy-2-hydroxymethylpyrrolidine
agatctgctcatctaagccta

SEQ ID NO: 830 - RNA, 21 nt, synthetic construct
  source 1..21: mol_type = other RNA
  modified_base 1: mod_base = OTHER; note = 2'-O-methylguanosine-3'- phosphorothioate
  modified_base 2: mod_base = OTHER; note = 2'-O-methyladenosine-3'- phosphorothioate
  modified_base 3: mod_base = OTHER; note = 2'-O-methyluridine-3'-phosphate
  modified_base 4: mod_base = OTHER; note = 2'-O-methylcytidine-3'-phosphate
  modified_base 5: mod_base = OTHER; note = 2'-O-methyluridine-3'-phosphate
  modified_base 6: mod_base = OTHER; note = 2'-O-hexadecyl-guanosine-3'-phosphate
  modified_base 7: mod_base = OTHER; note = 2'-fluorocytidine-3'-phosphate
  modified_base 8: mod_base = OTHER; note = 2'-O-methyluridine-3'-phosphate
  modified_base 9: mod_base = OTHER; note = 2'-fluorocytidine-3'-phosphate
  modified_base 10: mod_base = OTHER; note = 2'-fluoroadenosine-3'-phosphate
  modified_base 11: mod_base = OTHER; note = 2'-fluorouridine-3'-phosphate
  modified_base 12: mod_base = OTHER; note = 2'-O-methylcytidine-3'-phosphate
  modified_base 13: mod_base = OTHER; note = 2'-O-methyluridine-3'-phosphate
  modified_base 14: mod_base = OTHER; note = 2'-O-methyladenosine-3'-phosphate
  modified_base 15: mod_base = OTHER; note = 2'-O-methyladenosine-3'-phosphate
  modified_base 16: mod_base = OTHER; note = 2'-O-methylguanosine-3'-phosphate
  modified_base 17: mod_base = OTHER; note = 2'-O-methylcytidine-3'-phosphate
  modified_base 18: mod_base = OTHER; note = 2'-O-methylcytidine-3'-phosphate
  modified_base 19: mod_base = OTHER; note = 2'-O-methyluridine-3'-phosphate
  modified_base 20: mod_base = OTHER; note = 2'-O-methyladenosine-3'-phosphate
  modified_base 21: mod_base = OTHER; note = 2'-O-methyladenosine-3'-phosphate N-[tris(GalNAc-alkyl)-amidodecanoyl)]-4-hydroxyprolinol Hyp-(GalNAc-alkyl)3 (2S,4R)-1-[29-[[2-(acetylamino)-2-deoxy-beta-D-galactopyran osyl]oxy]-14,14-bis[[3-[[3-[[5-[[2-(acetylamino)-2-deoxy-be ta-D-galactopyranosyl]oxy]-1-oxopentyl]amino]propyl]amino]- 3-oxopropoxy]methyl]-1,12,19,25-tetraoxo-16-oxa-13,20,24-tr iazanonacos-1-yl]-4-hydroxy-2-hydroxymethylpyrrolidine
gatctgctcatctaagcctaa

SEQ ID NO: 831 - RNA, 21 nt, synthetic construct
  source 1..21: mol_type = other RNA
  modified_base 1: mod_base = OTHER; note = 2'-O-methylcytidine-3'- phosphorothioate
  modified_base 2: mod_base = OTHER; note = 2'-O-methyluridine-3'-phosphorothioate
  modified_base 3: mod_base = OTHER; note = 2'-O-methylguanosine-3'-phosphate
  modified_base 4: mod_base = OTHER; note = 2'-O-methylcytidine-3'-phosphate
  modified_base 5: mod_base = OTHER; note = 2'-O-methyluridine-3'-phosphate
  modified_base 6: mod_base = OTHER; note = 2'-O-hexadecyl-cytidine-3'-phosphate
  modified_base 7: mod_base = OTHER; note = 2'-fluoroadenosine-3'-phosphate
  modified_base 8: mod_base = OTHER; note = 2'-O-methyluridine-3'-phosphate
  modified_base 9: mod_base = OTHER; note = 2'-fluorocytidine-3'-phosphate
  modified_base 10: mod_base = OTHER; note = 2'-fluorouridine-3'-phosphate
  modified_base 11: mod_base = OTHER; note = 2'-fluoroadenosine-3'-phosphate
  modified_base 12: mod_base = OTHER; note = 2'-O-methyladenosine-3'-phosphate
  modified_base 13: mod_base = OTHER; note = 2'-O-methylguanosine-3'-phosphate
  modified_base 14: mod_base = OTHER; note = 2'-O-methylcytidine-3'-phosphate
  modified_base 15: mod_base = OTHER; note = 2'-O-methylcytidine-3'-phosphate
  modified_base 16: mod_base = OTHER; note = 2'-O-methyluridine-3'-phosphate
  modified_base 17: mod_base = OTHER; note = 2'-O-methyladenosine-3'-phosphate
  modified_base 18: mod_base = OTHER; note = 2'-O-methyladenosine-3'-phosphate
  modified_base 19: mod_base = OTHER; note = 2'-O-methylguanosine-3'-phosphate
  modified_base 20: mod_base = OTHER; note = 2'-O-methyluridine-3'-phosphate
  modified_base 21: mod_base = OTHER; note = 2'-O-methyladenosine-3'-phosphate N-[tris(GalNAc-alkyl)-amidodecanoyl)]-4-hydroxyprolinol Hyp-(GalNAc-alkyl)3 (2S,4R)-1-[29-[[2-(acetylamino)-2-deoxy-beta-D-galactopyran osyl]oxy]-14,14-bis[[3-[[3-[[5-[[2-(acetylamino)-2-deoxy-be ta-D-galactopyranosyl]oxy]-1-oxopentyl]amino]propyl]amino]- 3-oxopropoxy]methyl]-1,12,19,25-tetraoxo-16-oxa-13,20,24-tr iazanonacos-1-yl]-4-hydroxy-2-hydroxymethylpyrrolidine
ctgctcatctaagcctaagta

SEQ ID NO: 832 - RNA, 21 nt, synthetic construct
  source 1..21: mol_type = other RNA
  modified_base 1: mod_base = OTHER; note = 2'-O-methylcytidine-3'- phosphorothioate
  modified_base 2: mod_base = OTHER; note = 2'-O-methyluridine-3'-phosphorothioate
  modified_base 3: mod_base = OTHER; note = 2'-O-methylguanosine-3'-phosphate
  modified_base 4: mod_base = OTHER; note = 2'-O-methylcytidine-3'-phosphate
  modified_base 5: mod_base = OTHER; note = 2'-O-methyluridine-3'-phosphate
  modified_base 6: mod_base = OTHER; note = 2'-O-hexadecyl-cytidine-3'-phosphate
  modified_base 7: mod_base = OTHER; note = 2'-O-methyladenosine-3'-phosphate
  modified_base 8: mod_base = OTHER; note = 2'-O-methyluridine-3'-phosphate
  modified_base 9: mod_base = OTHER; note = 2'-fluorocytidine-3'-phosphate
  modified_base 10: mod_base = OTHER; note = 2'-fluorouridine-3'-phosphate
  modified_base 11: mod_base = OTHER; note = 2'-fluoroadenosine-3'-phosphate
  modified_base 12: mod_base = OTHER; note = 2'-O-methyladenosine-3'-phosphate
  modified_base 13: mod_base = OTHER; note = 2'-O-methylguanosine-3'-phosphate
  modified_base 14: mod_base = OTHER; note = 2'-O-methylcytidine-3'-phosphate
  modified_base 15: mod_base = OTHER; note = 2'-O-methylcytidine-3'-phosphate
  modified_base 16: mod_base = OTHER; note = 2'-O-methyluridine-3'-phosphate
  modified_base 17: mod_base = OTHER; note = 2'-O-methyladenosine-3'-phosphate
  modified_base 18: mod_base = OTHER; note = 2'-O-methyladenosine-3'-phosphate
  modified_base 19: mod_base = OTHER; note = 2'-O-methylguanosine-3'-phosphate
  modified_base 20: mod_base = OTHER; note = 2'-O-methyluridine-3'-phosphate
  modified_base 21: mod_base = OTHER; note = 2'-O-methyladenosine-3'-phosphate N-[tris(GalNAc-alkyl)-amidodecanoyl)]-4-hydroxyprolinol Hyp-(GalNAc-alkyl)3 (2S,4R)-1-[29-[[2-(acetylamino)-2-deoxy-beta-D-galactopyran osyl]oxy]-14,14-bis[[3-[[3-[[5-[[2-(acetylamino)-2-deoxy-be ta-D-galactopyranosyl]oxy]-1-oxopentyl]amino]propyl]amino]- 3-oxopropoxy]methyl]-1,12,19,25-tetraoxo-16-oxa-13,20,24-tr iazanonacos-1-yl]-4-hydroxy-2-hydroxymethylpyrrolidine
ctgctcatctaagcctaagta

SEQ ID NO: 833 - RNA, 21 nt, synthetic construct
  source 1..21: mol_type = other RNA
  modified_base 1: mod_base = OTHER; note = 2'-O-methyluridine-3'-phosphorothioate
  modified_base 2: mod_base = OTHER; note = 2'-O-methylguanosine-3'- phosphorothioate
  modified_base 3: mod_base = OTHER; note = 2'-O-methylcytidine-3'-phosphate
  modified_base 4: mod_base = OTHER; note = 2'-O-methyluridine-3'-phosphate
  modified_base 5: mod_base = OTHER; note = 2'-O-methylcytidine-3'-phosphate
  modified_base 6: mod_base = OTHER; note = 2'-O-hexadecyl-adenosine-3'-phosphate
  modified_base 7: mod_base = OTHER; note = 2'-fluorouridine-3'-phosphate
  modified_base 8: mod_base = OTHER; note = 2'-O-methylcytidine-3'-phosphate
  modified_base 9: mod_base = OTHER; note = 2'-fluorouridine-3'-phosphate
  modified_base 10: mod_base = OTHER; note = 2'-fluoroadenosine-3'-phosphate
  modified_base 11: mod_base = OTHER; note = 2'-fluoroadenosine-3'-phosphate
  modified_base 12: mod_base = OTHER; note = 2'-O-methylguanosine-3'-phosphate
  modified_base 13: mod_base = OTHER; note = 2'-O-methylcytidine-3'-phosphate
  modified_base 14: mod_base = OTHER; note = 2'-O-methylcytidine-3'-phosphate
  modified_base 15: mod_base = OTHER; note = 2'-O-methyluridine-3'-phosphate
  modified_base 16: mod_base = OTHER; note = 2'-O-methyladenosine-3'-phosphate
  modified_base 17: mod_base = OTHER; note = 2'-O-methyladenosine-3'-phosphate
  modified_base 18: mod_base = OTHER; note = 2'-O-methylguanosine-3'-phosphate
  modified_base 19: mod_base = OTHER; note = 2'-O-methyluridine-3'-phosphate
  modified_base 20: mod_base = OTHER; note = 2'-O-methyluridine-3'-phosphate
  modified_base 21: mod_base = OTHER; note = 2'-O-methyladenosine-3'-phosphate N-[tris(GalNAc-alkyl)-amidodecanoyl)]-4-hydroxyprolinol Hyp-(GalNAc-alkyl)3 (2S,4R)-1-[29-[[2-(acetylamino)-2-deoxy-beta-D-galactopyran osyl]oxy]-14,14-bis[[3-[[3-[[5-[[2-(acetylamino)-2-deoxy-be ta-D-galactopyranosyl]oxy]-1-oxopentyl]amino]propyl]amino]- 3-oxopropoxy]methyl]-1,12,19,25-tetraoxo-16-oxa-13,20,24-tr iazanonacos-1-yl]-4-hydroxy-2-hydroxymethylpyrrolidine
tgctcatctaagcctaagtta

SEQ ID NO: 834 - RNA, 21 nt, synthetic construct
  source 1..21: mol_type = other RNA
  modified_base 1: mod_base = OTHER; note = 2'-O-methyluridine-3'-phosphorothioate
  modified_base 2: mod_base = OTHER; note = 2'-O-methylguanosine-3'- phosphorothioate
  modified_base 3: mod_base = OTHER; note = 2'-O-methylcytidine-3'-phosphate
  modified_base 4: mod_base = OTHER; note = 2'-O-methyluridine-3'-phosphate
  modified_base 5: mod_base = OTHER; note = 2'-O-methylcytidine-3'-phosphate
  modified_base 6: mod_base = OTHER; note = 2'-O-hexadecyl-adenosine-3'-phosphate
  modified_base 7: mod_base = OTHER; note = 2'-O-methyluridine-3'-phosphate
  modified_base 8: mod_base = OTHER; note = 2'-O-methylcytidine-3'-phosphate
  modified_base 9: mod_base = OTHER; note = 2'-fluorouridine-3'-phosphate
  modified_base 10: mod_base = OTHER; note = 2'-fluoroadenosine-3'-phosphate
  modified_base 11: mod_base = OTHER; note = 2'-fluoroadenosine-3'-phosphate
  modified_base 12: mod_base = OTHER; note = 2'-O-methylguanosine-3'-phosphate
  modified_base 13: mod_base = OTHER; note = 2'-O-methylcytidine-3'-phosphate
  modified_base 14: mod_base = OTHER; note = 2'-O-methylcytidine-3'-phosphate
  modified_base 15: mod_base = OTHER; note = 2'-O-methyluridine-3'-phosphate
  modified_base 16: mod_base = OTHER; note = 2'-O-methyladenosine-3'-phosphate
  modified_base 17: mod_base = OTHER; note = 2'-O-methyladenosine-3'-phosphate
  modified_base 18: mod_base = OTHER; note = 2'-O-methylguanosine-3'-phosphate
  modified_base 19: mod_base = OTHER; note = 2'-O-methyluridine-3'-phosphate
  modified_base 20: mod_base = OTHER; note = 2'-O-methyluridine-3'-phosphate
  modified_base 21: mod_base = OTHER; note = 2'-O-methyladenosine-3'-phosphate N-[tris(GalNAc-alkyl)-amidodecanoyl)]-4-hydroxyprolinol Hyp-(GalNAc-alkyl)3 (2S,4R)-1-[29-[[2-(acetylamino)-2-deoxy-beta-D-galactopyran osyl]oxy]-14,14-bis[[3-[[3-[[5-[[2-(acetylamino)-2-deoxy-be ta-D-galactopyranosyl]oxy]-1-oxopentyl]amino]propyl]amino]- 3-oxopropoxy]methyl]-1,12,19,25-tetraoxo-16-oxa-13,20,24-tr iazanonacos-1-yl]-4-hydroxy-2-hydroxymethylpyrrolidine
tgctcatctaagcctaagtta

SEQ ID NO: 835 - RNA, 21 nt, synthetic construct
  source 1..21: mol_type = other RNA
  modified_base 1: mod_base = OTHER; note = 2'-O-methylguanosine-3'- phosphorothioate
  modified_base 2: mod_base = OTHER; note = 2'-O-methylcytidine-3'- phosphorothioate
  modified_base 3: mod_base = OTHER; note = 2'-O-methyluridine-3'-phosphate
  modified_base 4: mod_base = OTHER; note = 2'-O-methylcytidine-3'-phosphate
  modified_base 5: mod_base = OTHER; note = 2'-O-methyladenosine-3'-phosphate
  modified_base 6: mod_base = OTHER; note = 2'-O-hexadecyl-uridine-3'-phosphate
  modified_base 7: mod_base = OTHER; note = 2'-fluorocytidine-3'-phosphate
  modified_base 8: mod_base = OTHER; note = 2'-O-methyluridine-3'-phosphate
  modified_base 9: mod_base = OTHER; note = 2'-fluoroadenosine-3'-phosphate
  modified_base 10: mod_base = OTHER; note = 2'-fluoroadenosine-3'-phosphate
  modified_base 11: mod_base = OTHER; note = 2'-fluoroguanosine-3'-phosphate
  modified_base 12: mod_base = OTHER; note = 2'-O-methylcytidine-3'-phosphate
  modified_base 13: mod_base = OTHER; note = 2'-O-methylcytidine-3'-phosphate
  modified_base 14: mod_base = OTHER; note = 2'-O-methyluridine-3'-phosphate
  modified_base 15: mod_base = OTHER; note = 2'-O-methyladenosine-3'-phosphate
  modified_base 16: mod_base = OTHER; note = 2'-O-methyladenosine-3'-phosphate
  modified_base 17: mod_base = OTHER; note = 2'-O-methylguanosine-3'-phosphate
  modified_base 18: mod_base = OTHER; note = 2'-O-methyluridine-3'-phosphate
  modified_base 19: mod_base = OTHER; note = 2'-O-methyluridine-3'-phosphate
  modified_base 20: mod_base = OTHER; note = 2'-O-methylguanosine-3'-phosphate
  modified_base 21: mod_base = OTHER; note = 2'-O-methyladenosine-3'-phosphate N-[tris(GalNAc-alkyl)-amidodecanoyl)]-4-hydroxyprolinol Hyp-(GalNAc-alkyl)3 (2S,4R)-1-[29-[[2-(acetylamino)-2-deoxy-beta-D-galactopyran osyl]oxy]-14,14-bis[[3-[[3-[[5-[[2-(acetylamino)-2-deoxy-be ta-D-galactopyranosyl]oxy]-1-oxopentyl]amino]propyl]amino]- 3-oxopropoxy]methyl]-1,12,19,25-tetraoxo-16-oxa-13,20,24-tr iazanonacos-1-yl]-4-hydroxy-2-hydroxymethylpyrrolidine
gctcatctaagcctaagttga

SEQ ID NO: 836 - RNA, 21 nt, synthetic construct
  source 1..21: mol_type = other RNA
  modified_base 1: mod_base = OTHER; note = 2'-O-methylguanosine-3'- phosphorothioate
  modified_base 2: mod_base = OTHER; note = 2'-O-methylcytidine-3'- phosphorothioate
  modified_base 3: mod_base = OTHER; note = 2'-O-methyluridine-3'-phosphate
  modified_base 4: mod_base = OTHER; note = 2'-O-methylcytidine-3'-phosphate
  modified_base 5: mod_base = OTHER; note = 2'-O-methyladenosine-3'-phosphate
  modified_base 6: mod_base = OTHER; note = 2'-O-hexadecyl-uridine-3'-phosphate
  modified_base 7: mod_base = OTHER; note = 2'-O-methylcytidine-3'-phosphate
  modified_base 8: mod_base = OTHER; note = 2'-O-methyluridine-3'-phosphate
  modified_base 9: mod_base = OTHER; note = 2'-fluoroadenosine-3'-phosphate
  modified_base 10: mod_base = OTHER; note = 2'-fluoroadenosine-3'-phosphate
  modified_base 11: mod_base = OTHER; note = 2'-fluoroguanosine-3'-phosphate
  modified_base 12: mod_base = OTHER; note = 2'-O-methylcytidine-3'-phosphate
  modified_base 13: mod_base = OTHER; note = 2'-O-methylcytidine-3'-phosphate
  modified_base 14: mod_base = OTHER; note = 2'-O-methyluridine-3'-phosphate
  modified_base 15: mod_base = OTHER; note = 2'-O-methyladenosine-3'-phosphate
  modified_base 16: mod_base = OTHER; note = 2'-O-methyladenosine-3'-phosphate
  modified_base 17: mod_base = OTHER; note = 2'-O-methylguanosine-3'-phosphate
  modified_base 18: mod_base = OTHER; note = 2'-O-methyluridine-3'-phosphate
  modified_base 19: mod_base = OTHER; note = 2'-O-methyluridine-3'-phosphate
  modified_base 20: mod_base = OTHER; note = 2'-O-methylguanosine-3'-phosphate
  modified_base 21: mod_base = OTHER; note = 2'-O-methyladenosine-3'-phosphate N-[tris(GalNAc-alkyl)-amidodecanoyl)]-4-hydroxyprolinol Hyp-(GalNAc-alkyl)3 (2S,4R)-1-[29-[[2-(acetylamino)-2-deoxy-beta-D-galactopyran osyl]oxy]-14,14-bis[[3-[[3-[[5-[[2-(acetylamino)-2-deoxy-be ta-D-galactopyranosyl]oxy]-1-oxopentyl]amino]propyl]amino]- 3-oxopropoxy]methyl]-1,12,19,25-tetraoxo-16-oxa-13,20,24-tr iazanonacos-1-yl]-4-hydroxy-2-hydroxymethylpyrrolidine
gctcatctaagcctaagttga

SEQ ID NO: 837 - RNA, 21 nt, synthetic construct
  source 1..21: mol_type = other RNA
  modified_base 1: mod_base = OTHER; note = 2'-O-methylcytidine-3'- phosphorothioate
  modified_base 2: mod_base = OTHER; note = 2'-O-methyluridine-3'-phosphorothioate
  modified_base 3: mod_base = OTHER; note = 2'-O-methylcytidine-3'-phosphate
  modified_base 4: mod_base = OTHER; note = 2'-O-methyladenosine-3'-phosphate
  modified_base 5: mod_base = OTHER; note = 2'-O-methyluridine-3'-phosphate
  modified_base 6: mod_base = OTHER; note = 2'-O-hexadecyl-cytidine-3'-phosphate
  modified_base 7: mod_base = OTHER; note = 2'-fluorouridine-3'-phosphate
  modified_base 8: mod_base = OTHER; note = 2'-O-methyladenosine-3'-phosphate
  modified_base 9: mod_base = OTHER; note = 2'-fluoroadenosine-3'-phosphate
  modified_base 10: mod_base = OTHER; note = 2'-fluoroguanosine-3'-phosphate
  modified_base 11: mod_base = OTHER; note = 2'-fluorocytidine-3'-phosphate
  modified_base 12: mod_base = OTHER; note = 2'-O-methylcytidine-3'-phosphate
  modified_base 13: mod_base = OTHER; note = 2'-O-methyluridine-3'-phosphate
  modified_base 14: mod_base = OTHER; note = 2'-O-methyladenosine-3'-phosphate
  modified_base 15: mod_base = OTHER; note = 2'-O-methyladenosine-3'-phosphate
  modified_base 16: mod_base = OTHER; note = 2'-O-methylguanosine-3'-phosphate
  modified_base 17: mod_base = OTHER; note = 2'-O-methyluridine-3'-phosphate
  modified_base 18: mod_base = OTHER; note = 2'-O-methyluridine-3'-phosphate
  modified_base 19: mod_base = OTHER; note = 2'-O-methylguanosine-3'-phosphate
  modified_base 20: mod_base = OTHER; note = 2'-O-methylguanosine-3'-phosphate
  modified_base 21: mod_base = OTHER; note = 2'-O-methyladenosine-3'-phosphate N-[tris(GalNAc-alkyl)-amidodecanoyl)]-4-hydroxyprolinol Hyp-(GalNAc-alkyl)3 (2S,4R)-1-[29-[[2-(acetylamino)-2-deoxy-beta-D-galactopyran osyl]oxy]-14,14-bis[[3-[[3-[[5-[[2-(acetylamino)-2-deoxy-be ta-D-galactopyranosyl]oxy]-1-oxopentyl]amino]propyl]amino]- 3-oxopropoxy]methyl]-1,12,19,25-tetraoxo-16-oxa-13,20,24-tr iazanonacos-1-yl]-4-hydroxy-2-hydroxymethylpyrrolidine
ctcatctaagcctaagttgga

SEQ ID NO: 838 - RNA, 21 nt, synthetic construct
  source 1..21: mol_type = other RNA
  modified_base 1: mod_base = OTHER; note = 2'-O-methylcytidine-3'- phosphorothioate
  modified_base 2: mod_base = OTHER; note = 2'-O-methyluridine-3'-phosphorothioate
  modified_base 3: mod_base = OTHER; note = 2'-O-methylcytidine-3'-phosphate
  modified_base 4: mod_base = OTHER; note = 2'-O-methyladenosine-3'-phosphate
  modified_base 5: mod_base = OTHER; note = 2'-O-methyluridine-3'-phosphate
  modified_base 6: mod_base = OTHER; note = 2'-O-hexadecyl-cytidine-3'-phosphate
  modified_base 7: mod_base = OTHER; note = 2'-O-methyluridine-3'-phosphate
  modified_base 8: mod_base = OTHER; note = 2'-O-methyladenosine-3'-phosphate
  modified_base 9: mod_base = OTHER; note = 2'-fluoroadenosine-3'-phosphate
  modified_base 10: mod_base = OTHER; note = 2'-fluoroguanosine-3'-phosphate
  modified_base 11: mod_base = OTHER; note = 2'-fluorocytidine-3'-phosphate
  modified_base 12: mod_base = OTHER; note = 2'-O-methylcytidine-3'-phosphate
  modified_base 13: mod_base = OTHER; note = 2'-O-methyluridine-3'-phosphate
  modified_base 14: mod_base = OTHER; note = 2'-O-methyladenosine-3'-phosphate
  modified_base 15: mod_base = OTHER; note = 2'-O-methyladenosine-3'-phosphate
  modified_base 16: mod_base = OTHER; note = 2'-O-methylguanosine-3'-phosphate
  modified_base 17: mod_base = OTHER; note = 2'-O-methyluridine-3'-phosphate
  modified_base 18: mod_base = OTHER; note = 2'-O-methyluridine-3'-phosphate
  modified_base 19: mod_base = OTHER; note = 2'-O-methylguanosine-3'-phosphate
  modified_base 20: mod_base = OTHER; note = 2'-O-methylguanosine-3'-phosphate
  modified_base 21: mod_base = OTHER; note = 2'-O-methyladenosine-3'-phosphate N-[tris(GalNAc-alkyl)-amidodecanoyl)]-4-hydroxyprolinol Hyp-(GalNAc-alkyl)3 (2S,4R)-1-[29-[[2-(acetylamino)-2-deoxy-beta-D-galactopyran osyl]oxy]-14,14-bis[[3-[[3-[[5-[[2-(acetylamino)-2-deoxy-be ta-D-galactopyranosyl]oxy]-1-oxopentyl]amino]propyl]amino]- 3-oxopropoxy]methyl]-1,12,19,25-tetraoxo-16-oxa-13,20,24-tr iazanonacos-1-yl]-4-hydroxy-2-hydroxymethylpyrrolidine
ctcatctaagcctaagttgga

SEQ ID NO: 839 - RNA, 21 nt, synthetic construct
  source 1..21: mol_type = other RNA
  modified_base 1: mod_base = OTHER; note = 2'-O-methyluridine-3'-phosphorothioate
  modified_base 2: mod_base = OTHER; note = 2'-O-methylcytidine-3'- phosphorothioate
  modified_base 3: mod_base = OTHER; note = 2'-O-methyladenosine-3'-phosphate
  modified_base 4: mod_base = OTHER; note = 2'-O-methyluridine-3'-phosphate
  modified_base 5: mod_base = OTHER; note = 2'-O-methylcytidine-3'-phosphate
  modified_base 6: mod_base = OTHER; note = 2'-O-hexadecyl-uridine-3'-phosphate
  modified_base 7: mod_base = OTHER; note = 2'-fluoroadenosine-3'-phosphate
  modified_base 8: mod_base = OTHER; note = 2'-O-methyladenosine-3'-phosphate
  modified_base 9: mod_base = OTHER; note = 2'-fluoroguanosine-3'-phosphate
  modified_base 10: mod_base = OTHER; note = 2'-fluorocytidine-3'-phosphate
  modified_base 11: mod_base = OTHER; note = 2'-fluorocytidine-3'-phosphate
  modified_base 12: mod_base = OTHER; note = 2'-O-methyluridine-3'-phosphate
  modified_base 13: mod_base = OTHER; note = 2'-O-methyladenosine-3'-phosphate
  modified_base 14: mod_base = OTHER; note = 2'-O-methyladenosine-3'-phosphate
  modified_base 15: mod_base = OTHER; note = 2'-O-methylguanosine-3'-phosphate
  modified_base 16: mod_base = OTHER; note = 2'-O-methyluridine-3'-phosphate
  modified_base 17: mod_base = OTHER; note = 2'-O-methyluridine-3'-phosphate
  modified_base 18: mod_base = OTHER; note = 2'-O-methylguanosine-3'-phosphate
  modified_base 19: mod_base = OTHER; note = 2'-O-methylguanosine-3'-phosphate
  modified_base 20: mod_base = OTHER; note = 2'-O-methyluridine-3'-phosphate
  modified_base 21: mod_base = OTHER; note = 2'-O-methyladenosine-3'-phosphate N-[tris(GalNAc-alkyl)-amidodecanoyl)]-4-hydroxyprolinol Hyp-(GalNAc-alkyl)3 (2S,4R)-1-[29-[[2-(acetylamino)-2-deoxy-beta-D-galactopyran osyl]oxy]-14,14-bis[[3-[[3-[[5-[[2-(acetylamino)-2-deoxy-be ta-D-galactopyranosyl]oxy]-1-oxopentyl]amino]propyl]amino]- 3-oxopropoxy]methyl]-1,12,19,25-tetraoxo-16-oxa-13,20,24-tr iazanonacos-1-yl]-4-hydroxy-2-hydroxymethylpyrrolidine
tcatctaagcctaagttggta

SEQ ID NO: 840 - RNA, 21 nt, synthetic construct
  source 1..21: mol_type = other RNA
  modified_base 1: mod_base = OTHER; note = 2'-O-methyluridine-3'-phosphorothioate
  modified_base 2: mod_base = OTHER; note = 2'-O-methylcytidine-3'- phosphorothioate
  modified_base 3: mod_base = OTHER; note = 2'-O-methyladenosine-3'-phosphate
  modified_base 4: mod_base = OTHER; note = 2'-O-methyluridine-3'-phosphate
  modified_base 5: mod_base = OTHER; note = 2'-O-methylcytidine-3'-phosphate
  modified_base 6: mod_base = OTHER; note = 2'-O-hexadecyl-uridine-3'-phosphate
  modified_base 7: mod_base = OTHER; note = 2'-O-methyladenosine-3'-phosphate
  modified_base 8: mod_base = OTHER; note = 2'-O-methyladenosine-3'-phosphate
  modified_base 9: mod_base = OTHER; note = 2'-fluoroguanosine-3'-phosphate
  modified_base 10: mod_base = OTHER; note = 2'-fluorocytidine-3'-phosphate
  modified_base 11: mod_base = OTHER; note = 2'-fluorocytidine-3'-phosphate
  modified_base 12: mod_base = OTHER; note = 2'-O-methyluridine-3'-phosphate
  modified_base 13: mod_base = OTHER; note = 2'-O-methyladenosine-3'-phosphate
  modified_base 14: mod_base = OTHER; note = 2'-O-methyladenosine-3'-phosphate
  modified_base 15: mod_base = OTHER; note = 2'-O-methylguanosine-3'-phosphate
  modified_base 16: mod_base = OTHER; note = 2'-O-methyluridine-3'-phosphate
  modified_base 17: mod_base = OTHER; note = 2'-O-methyluridine-3'-phosphate
  modified_base 18: mod_base = OTHER; note = 2'-O-methylguanosine-3'-phosphate
  modified_base 19: mod_base = OTHER; note = 2'-O-methylguanosine-3'-phosphate
  modified_base 20: mod_base = OTHER; note = 2'-O-methyluridine-3'-phosphate
  modified_base 21: mod_base = OTHER; note = 2'-O-methyladenosine-3'-phosphate N-[tris(GalNAc-alkyl)-amidodecanoyl)]-4-hydroxyprolinol Hyp-(GalNAc-alkyl)3 (2S,4R)-1-[29-[[2-(acetylamino)-2-deoxy-beta-D-galactopyran osyl]oxy]-14,14-bis[[3-[[3-[[5-[[2-(acetylamino)-2-deoxy-be ta-D-galactopyranosyl]oxy]-1-oxopentyl]amino]propyl]amino]- 3-oxopropoxy]methyl]-1,12,19,25-tetraoxo-16-oxa-13,20,24-tr iazanonacos-1-yl]-4-hydroxy-2-hydroxymethylpyrrolidine
tcatctaagcctaagttggta

SEQ ID NO: 841 - RNA, 21 nt, synthetic construct
  source 1..21: mol_type = other RNA
  modified_base 1: mod_base = OTHER; note = 2'-O-methylcytidine-3'- phosphorothioate
  modified_base 2: mod_base = OTHER; note = 2'-O-methyladenosine-3'- phosphorothioate
  modified_base 3: mod_base = OTHER; note = 2'-O-methyluridine-3'-phosphate
  modified_base 4: mod_base = OTHER; note = 2'-O-methylcytidine-3'-phosphate
  modified_base 5: mod_base = OTHER; note = 2'-O-methyluridine-3'-phosphate
  modified_base 6: mod_base = OTHER; note = 2'-O-hexadecyl-adenosine-3'-phosphate
  modified_base 7: mod_base = OTHER; note = 2'-fluoroadenosine-3'-phosphate
  modified_base 8: mod_base = OTHER; note = 2'-O-methylguanosine-3'-phosphate
  modified_base 9: mod_base = OTHER; note = 2'-fluorocytidine-3'-phosphate
  modified_base 10: mod_base = OTHER; note = 2'-fluorocytidine-3'-phosphate
  modified_base 11: mod_base = OTHER; note = 2'-fluorouridine-3'-phosphate
  modified_base 12: mod_base = OTHER; note = 2'-O-methyladenosine-3'-phosphate
  modified_base 13: mod_base = OTHER; note = 2'-O-methyladenosine-3'-phosphate
  modified_base 14: mod_base = OTHER; note = 2'-O-methylguanosine-3'-phosphate
  modified_base 15: mod_base = OTHER; note = 2'-O-methyluridine-3'-phosphate
  modified_base 16: mod_base = OTHER; note = 2'-O-methyluridine-3'-phosphate
  modified_base 17: mod_base = OTHER; note = 2'-O-methylguanosine-3'-phosphate
  modified_base 18: mod_base = OTHER; note = 2'-O-methylguanosine-3'-phosphate
  modified_base 19: mod_base = OTHER; note = 2'-O-methyluridine-3'-phosphate
  modified_base 20: mod_base = OTHER; note = 2'-O-methylcytidine-3'-phosphate
  modified_base 21: mod_base = OTHER; note = 2'-O-methyladenosine-3'-phosphate N-[tris(GalNAc-alkyl)-amidodecanoyl)]-4-hydroxyprolinol Hyp-(GalNAc-alkyl)3 (2S,4R)-1-[29-[[2-(acetylamino)-2-deoxy-beta-D-galactopyran osyl]oxy]-14,14-bis[[3-[[3-[[5-[[2-(acetylamino)-2-deoxy-be ta-D-galactopyranosyl]oxy]-1-oxopentyl]amino]propyl]amino]- 3-oxopropoxy]methyl]-1,12,19,25-tetraoxo-16-oxa-13,20,24-tr iazanonacos-1-yl]-4-hydroxy-2-hydroxymethylpyrrolidine
catctaagcctaagttggtca

SEQ ID NO: 842 - RNA, 21 nt, synthetic construct
  source 1..21: mol_type = other RNA
  modified_base 1: mod_base = OTHER; note = 2'-O-methylcytidine-3'- phosphorothioate
  modified_base 2: mod_base = OTHER; note = 2'-O-methyladenosine-3'- phosphorothioate
  modified_base 3: mod_base = OTHER; note = 2'-O-methyluridine-3'-phosphate
  modified_base 4: mod_base = OTHER; note = 2'-O-methylcytidine-3'-phosphate
  modified_base 5: mod_base = OTHER; note = 2'-O-methyluridine-3'-phosphate
  modified_base 6: mod_base = OTHER; note = 2'-O-hexadecyl-adenosine-3'-phosphate
  modified_base 7: mod_base = OTHER; note = 2'-O-methyladenosine-3'-phosphate
  modified_base 8: mod_base = OTHER; note = 2'-O-methylguanosine-3'-phosphate
  modified_base 9: mod_base = OTHER; note = 2'-fluorocytidine-3'-phosphate
  modified_base 10: mod_base = OTHER; note = 2'-fluorocytidine-3'-phosphate
  modified_base 11: mod_base = OTHER; note = 2'-fluorouridine-3'-phosphate
  modified_base 12: mod_base = OTHER; note = 2'-O-methyladenosine-3'-phosphate
  modified_base 13: mod_base = OTHER; note = 2'-O-methyladenosine-3'-phosphate
  modified_base 14: mod_base = OTHER; note = 2'-O-methylguanosine-3'-phosphate
  modified_base 15: mod_base = OTHER; note = 2'-O-methyluridine-3'-phosphate
  modified_base 16: mod_base = OTHER; note = 2'-O-methyluridine-3'-phosphate
  modified_base 17: mod_base = OTHER; note = 2'-O-methylguanosine-3'-phosphate
  modified_base 18: mod_base = OTHER; note = 2'-O-methylguanosine-3'-phosphate
  modified_base 19: mod_base = OTHER; note = 2'-O-methyluridine-3'-phosphate
  modified_base 20: mod_base = OTHER; note = 2'-O-methylcytidine-3'-phosphate
  modified_base 21: mod_base = OTHER; note = 2'-O-methyladenosine-3'-phosphate N-[tris(GalNAc-alkyl)-amidodecanoyl)]-4-hydroxyprolinol Hyp-(GalNAc-alkyl)3 (2S,4R)-1-[29-[[2-(acetylamino)-2-deoxy-beta-D-galactopyran osyl]oxy]-14,14-bis[[3-[[3-[[5-[[2-(acetylamino)-2-deoxy-be ta-D-galactopyranosyl]oxy]-1-oxopentyl]amino]propyl]amino]- 3-oxopropoxy]methyl]-1,12,19,25-tetraoxo-16-oxa-13,20,24-tr iazanonacos-1-yl]-4-hydroxy-2-hydroxymethylpyrrolidine
catctaagcctaagttggtca

SEQ ID NO: 843 - RNA, 21 nt, synthetic construct
  source 1..21: mol_type = other RNA
  modified_base 1: mod_base = OTHER; note = 2'-O-methyladenosine-3'- phosphorothioate
  modified_base 2: mod_base = OTHER; note = 2'-O-methyluridine-3'-phosphorothioate
  modified_base 3: mod_base = OTHER; note = 2'-O-methylcytidine-3'-phosphate
  modified_base 4: mod_base = OTHER; note = 2'-O-methyluridine-3'-phosphate
  modified_base 5: mod_base = OTHER; note = 2'-O-methyladenosine-3'-phosphate
  modified_base 6: mod_base = OTHER; note = 2'-O-hexadecyl-adenosine-3'-phosphate
  modified_base 7: mod_base = OTHER; note = 2'-fluoroguanosine-3'-phosphate
  modified_base 8: mod_base = OTHER; note = 2'-O-methylcytidine-3'-phosphate
  modified_base 9: mod_base = OTHER; note = 2'-fluorocytidine-3'-phosphate
  modified_base 10: mod_base = OTHER; note = 2'-fluorouridine-3'-phosphate
  modified_base 11: mod_base = OTHER; note = 2'-fluoroadenosine-3'-phosphate
  modified_base 12: mod_base = OTHER; note = 2'-O-methyladenosine-3'-phosphate
  modified_base 13: mod_base = OTHER; note = 2'-O-methylguanosine-3'-phosphate
  modified_base 14: mod_base = OTHER; note = 2'-O-methyluridine-3'-phosphate
  modified_base 15: mod_base = OTHER; note = 2'-O-methyluridine-3'-phosphate
  modified_base 16: mod_base = OTHER; note = 2'-O-methylguanosine-3'-phosphate
  modified_base 17: mod_base = OTHER; note = 2'-O-methylguanosine-3'-phosphate
  modified_base 18: mod_base = OTHER; note = 2'-O-methyluridine-3'-phosphate
  modified_base 19: mod_base = OTHER; note = 2'-O-methylcytidine-3'-phosphate
  modified_base 20: mod_base = OTHER; note = 2'-O-methyluridine-3'-phosphate
  modified_base 21: mod_base = OTHER; note = 2'-O-methyladenosine-3'-phosphate N-[tris(GalNAc-alkyl)-amidodecanoyl)]-4-hydroxyprolinol Hyp-(GalNAc-alkyl)3 (2S,4R)-1-[29-[[2-(acetylamino)-2-deoxy-beta-D-galactopyran osyl]oxy]-14,14-bis[[3-[[3-[[5-[[2-(acetylamino)-2-deoxy-be ta-D-galactopyranosyl]oxy]-1-oxopentyl]amino]propyl]amino]- 3-oxopropoxy]methyl]-1,12,19,25-tetraoxo-16-oxa-13,20,24-tr iazanonacos-1-yl]-4-hydroxy-2-hydroxymethylpyrrolidine
atctaagcctaagttggtcta

SEQ ID NO: 844 - RNA, 21 nt, synthetic construct
  source 1..21: mol_type = other RNA
  modified_base 1: mod_base = OTHER; note = 2'-O-methyladenosine-3'- phosphorothioate
  modified_base 2: mod_base = OTHER; note = 2'-O-methyluridine-3'-phosphorothioate
  modified_base 3: mod_base = OTHER; note = 2'-O-methylcytidine-3'-phosphate
  modified_base 4: mod_base = OTHER; note = 2'-O-methyluridine-3'-phosphate
  modified_base 5: mod_base = OTHER; note = 2'-O-methyladenosine-3'-phosphate
  modified_base 6: mod_base = OTHER; note = 2'-O-hexadecyl-adenosine-3'-phosphate
  modified_base 7: mod_base = OTHER; note = 2'-O-methylguanosine-3'-phosphate
  modified_base 8: mod_base = OTHER; note = 2'-O-methylcytidine-3'-phosphate
  modified_base 9: mod_base = OTHER; note = 2'-fluorocytidine-3'-phosphate
  modified_base 10: mod_base = OTHER; note = 2'-fluorouridine-3'-phosphate
  modified_base 11: mod_base = OTHER; note = 2'-fluoroadenosine-3'-phosphate
  modified_base 12: mod_base = OTHER; note = 2'-O-methyladenosine-3'-phosphate
  modified_base 13: mod_base = OTHER; note = 2'-O-methylguanosine-3'-phosphate
  modified_base 14: mod_base = OTHER; note = 2'-O-methyluridine-3'-phosphate
  modified_base 15: mod_base = OTHER; note = 2'-O-methyluridine-3'-phosphate
  modified_base 16: mod_base = OTHER; note = 2'-O-methylguanosine-3'-phosphate
  modified_base 17: mod_base = OTHER; note = 2'-O-methylguanosine-3'-phosphate
  modified_base 18: mod_base = OTHER; note = 2'-O-methyluridine-3'-phosphate
  modified_base 19: mod_base = OTHER; note = 2'-O-methylcytidine-3'-phosphate
  modified_base 20: mod_base = OTHER; note = 2'-O-methyluridine-3'-phosphate
  modified_base 21: mod_base = OTHER; note = 2'-O-methyladenosine-3'-phosphate N-[tris(GalNAc-alkyl)-amidodecanoyl)]-4-hydroxyprolinol Hyp-(GalNAc-alkyl)3 (2S,4R)-1-[29-[[2-(acetylamino)-2-deoxy-beta-D-galactopyran osyl]oxy]-14,14-bis[[3-[[3-[[5-[[2-(acetylamino)-2-deoxy-be ta-D-galactopyranosyl]oxy]-1-oxopentyl]amino]propyl]amino]- 3-oxopropoxy]methyl]-1,12,19,25-tetraoxo-16-oxa-13,20,24-tr iazanonacos-1-yl]-4-hydroxy-2-hydroxymethylpyrrolidine
atctaagcctaagttggtcta

SEQ ID NO: 845 - RNA, 21 nt, synthetic construct
  source 1..21: mol_type = other RNA
  modified_base 1: mod_base = OTHER; note = 2'-O-methyluridine-3'-phosphorothioate
  modified_base 2: mod_base = OTHER; note = 2'-O-methylcytidine-3'- phosphorothioate
  modified_base 3: mod_base = OTHER; note = 2'-O-methyluridine-3'-phosphate
  modified_base 4: mod_base = OTHER; note = 2'-O-methyladenosine-3'-phosphate
  modified_base 5: mod_base = OTHER; note = 2'-O-methyladenosine-3'-phosphate
  modified_base 6: mod_base = OTHER; note = 2'-O-hexadecyl-guanosine-3'-phosphate
  modified_base 7: mod_base = OTHER; note = 2'-fluorocytidine-3'-phosphate
  modified_base 8: mod_base = OTHER; note = 2'-O-methylcytidine-3'-phosphate
  modified_base 9: mod_base = OTHER; note = 2'-fluorouridine-3'-phosphate
  modified_base 10: mod_base = OTHER; note = 2'-fluoroadenosine-3'-phosphate
  modified_base 11: mod_base = OTHER; note = 2'-fluoroadenosine-3'-phosphate
  modified_base 12: mod_base = OTHER; note = 2'-O-methylguanosine-3'-phosphate
  modified_base 13: mod_base = OTHER; note = 2'-O-methyluridine-3'-phosphate
  modified_base 14: mod_base = OTHER; note = 2'-O-methyluridine-3'-phosphate
  modified_base 15: mod_base = OTHER; note = 2'-O-methylguanosine-3'-phosphate
  modified_base 16: mod_base = OTHER; note = 2'-O-methylguanosine-3'-phosphate
  modified_base 17: mod_base = OTHER; note = 2'-O-methyluridine-3'-phosphate
  modified_base 18: mod_base = OTHER; note = 2'-O-methylcytidine-3'-phosphate
  modified_base 19: mod_base = OTHER; note = 2'-O-methyluridine-3'-phosphate
  modified_base 20: mod_base = OTHER; note = 2'-O-methylguanosine-3'-phosphate
  modified_base 21: mod_base = OTHER; note = 2'-O-methyladenosine-3'-phosphate N-[tris(GalNAc-alkyl)-amidodecanoyl)]-4-hydroxyprolinol Hyp-(GalNAc-alkyl)3 (2S,4R)-1-[29-[[2-(acetylamino)-2-deoxy-beta-D-galactopyran osyl]oxy]-14,14-bis[[3-[[3-[[5-[[2-(acetylamino)-2-deoxy-be ta-D-galactopyranosyl]oxy]-1-oxopentyl]amino]propyl]amino]- 3-oxopropoxy]methyl]-1,12,19,25-tetraoxo-16-oxa-13,20,24-tr iazanonacos-1-yl]-4-hydroxy-2-hydroxymethylpyrrolidine
tctaagcctaagttggtctga

SEQ ID NO: 846 - RNA, 21 nt, synthetic construct
  source 1..21: mol_type = other RNA
  modified_base 1: mod_base = OTHER; note = 2'-O-methyluridine-3'-phosphorothioate
  modified_base 2: mod_base = OTHER; note = 2'-O-methylcytidine-3'- phosphorothioate
  modified_base 3: mod_base = OTHER; note = 2'-O-methyluridine-3'-phosphate
  modified_base 4: mod_base = OTHER; note = 2'-O-methyladenosine-3'-phosphate
  modified_base 5: mod_base = OTHER; note = 2'-O-methyladenosine-3'-phosphate
  modified_base 6: mod_base = OTHER; note = 2'-O-hexadecyl-guanosine-3'-phosphate
  modified_base 7: mod_base = OTHER; note = 2'-O-methylcytidine-3'-phosphate
  modified_base 8: mod_base = OTHER; note = 2'-O-methylcytidine-3'-phosphate
  modified_base 9: mod_base = OTHER; note = 2'-fluorouridine-3'-phosphate
  modified_base 10: mod_base = OTHER; note = 2'-fluoroadenosine-3'-phosphate
  modified_base 11: mod_base = OTHER; note = 2'-fluoroadenosine-3'-phosphate
  modified_base 12: mod_base = OTHER; note = 2'-O-methylguanosine-3'-phosphate
  modified_base 13: mod_base = OTHER; note = 2'-O-methyluridine-3'-phosphate
  modified_base 14: mod_base = OTHER; note = 2'-O-methyluridine-3'-phosphate
  modified_base 15: mod_base = OTHER; note = 2'-O-methylguanosine-3'-phosphate
  modified_base 16: mod_base = OTHER; note = 2'-O-methylguanosine-3'-phosphate
  modified_base 17: mod_base = OTHER; note = 2'-O-methyluridine-3'-phosphate
  modified_base 18: mod_base = OTHER; note = 2'-O-methylcytidine-3'-phosphate
  modified_base 19: mod_base = OTHER; note = 2'-O-methyluridine-3'-phosphate
  modified_base 20: mod_base = OTHER; note = 2'-O-methylguanosine-3'-phosphate
  modified_base 21: mod_base = OTHER; note = 2'-O-methyladenosine-3'-phosphate N-[tris(GalNAc-alkyl)-amidodecanoyl)]-4-hydroxyprolinol Hyp-(GalNAc-alkyl)3 (2S,4R)-1-[29-[[2-(acetylamino)-2-deoxy-beta-D-galactopyran osyl]oxy]-14,14-bis[[3-[[3-[[5-[[2-(acetylamino)-2-deoxy-be ta-D-galactopyranosyl]oxy]-1-oxopentyl]amino]propyl]amino]- 3-oxopropoxy]methyl]-1,12,19,25-tetraoxo-16-oxa-13,20,24-tr iazanonacos-1-yl]-4-hydroxy-2-hydroxymethylpyrrolidine
tctaagcctaagttggtctga

SEQ ID NO: 847 - RNA, 21 nt, synthetic construct
  source 1..21: mol_type = other RNA
  modified_base 1: mod_base = OTHER; note = 2'-O-methylcytidine-3'- phosphorothioate
  modified_base 2: mod_base = OTHER; note = 2'-O-methyluridine-3'-phosphorothioate
  modified_base 3: mod_base = OTHER; note = 2'-O-methyladenosine-3'-phosphate
  modified_base 4: mod_base = OTHER; note = 2'-O-methyladenosine-3'-phosphate
  modified_base 5: mod_base = OTHER; note = 2'-O-methylguanosine-3'-phosphate
  modified_base 6: mod_base = OTHER; note = 2'-O-hexadecyl-cytidine-3'-phosphate
  modified_base 7: mod_base = OTHER; note = 2'-fluorocytidine-3'-phosphate
  modified_base 8: mod_base = OTHER; note = 2'-O-methyluridine-3'-phosphate
  modified_base 9: mod_base = OTHER; note = 2'-fluoroadenosine-3'-phosphate
  modified_base 10: mod_base = OTHER; note = 2'-fluoroadenosine-3'-phosphate
  modified_base 11: mod_base = OTHER; note = 2'-fluoroguanosine-3'-phosphate
  modified_base 12: mod_base = OTHER; note = 2'-O-methyluridine-3'-phosphate
  modified_base 13: mod_base = OTHER; note = 2'-O-methyluridine-3'-phosphate
  modified_base 14: mod_base = OTHER; note = 2'-O-methylguanosine-3'-phosphate
  modified_base 15: mod_base = OTHER; note = 2'-O-methylguanosine-3'-phosphate
  modified_base 16: mod_base = OTHER; note = 2'-O-methyluridine-3'-phosphate
  modified_base 17: mod_base = OTHER; note = 2'-O-methylcytidine-3'-phosphate
  modified_base 18: mod_base = OTHER; note = 2'-O-methyluridine-3'-phosphate
  modified_base 19: mod_base = OTHER; note = 2'-O-methylguanosine-3'-phosphate
  modified_base 20: mod_base = OTHER; note = 2'-O-methylcytidine-3'-phosphate
  modified_base 21: mod_base = OTHER; note = 2'-O-methyladenosine-3'-phosphate N-[tris(GalNAc-alkyl)-amidodecanoyl)]-4-hydroxyprolinol Hyp-(GalNAc-alkyl)3 (2S,4R)-1-[29-[[2-(acetylamino)-2-deoxy-beta-D-galactopyran osyl]oxy]-14,14-bis[[3-[[3-[[5-[[2-(acetylamino)-2-deoxy-be ta-D-galactopyranosyl]oxy]-1-oxopentyl]amino]propyl]amino]- 3-oxopropoxy]methyl]-1,12,19,25-tetraoxo-16-oxa-13,20,24-tr iazanonacos-1-yl]-4-hydroxy-2-hydroxymethylpyrrolidine
ctaagcctaagttggtctgca

SEQ ID NO: 848 - RNA, 21 nt, synthetic construct
  source 1..21: mol_type = other RNA
  modified_base 1: mod_base = OTHER; note = 2'-O-methyluridine-3'-phosphorothioate
  modified_base 2: mod_base = OTHER; note = 2'-O-methyladenosine-3'- phosphorothioate
  modified_base 3: mod_base = OTHER; note = 2'-O-methyladenosine-3'-phosphate
  modified_base 4: mod_base = OTHER; note = 2'-O-methylguanosine-3'-phosphate
  modified_base 5: mod_base = OTHER; note = 2'-O-methylcytidine-3'-phosphate
  modified_base 6: mod_base = OTHER; note = 2'-O-hexadecyl-cytidine-3'-phosphate
  modified_base 7: mod_base = OTHER; note = 2'-fluorouridine-3'-phosphate
  modified_base 8: mod_base = OTHER; note = 2'-O-methyladenosine-3'-phosphate
  modified_base 9: mod_base = OTHER; note = 2'-fluoroadenosine-3'-phosphate
  modified_base 10: mod_base = OTHER; note = 2'-fluoroguanosine-3'-phosphate
  modified_base 11: mod_base = OTHER; note = 2'-fluorouridine-3'-phosphate
  modified_base 12: mod_base = OTHER; note = 2'-O-methyluridine-3'-phosphate
  modified_base 13: mod_base = OTHER; note = 2'-O-methylguanosine-3'-phosphate
  modified_base 14: mod_base = OTHER; note = 2'-O-methylguanosine-3'-phosphate
  modified_base 15: mod_base = OTHER; note = 2'-O-methyluridine-3'-phosphate
  modified_base 16: mod_base = OTHER; note = 2'-O-methylcytidine-3'-phosphate
  modified_base 17: mod_base = OTHER; note = 2'-O-methyluridine-3'-phosphate
  modified_base 18: mod_base = OTHER; note = 2'-O-methylguanosine-3'-phosphate
  modified_base 19: mod_base = OTHER; note = 2'-O-methylcytidine-3'-phosphate
  modified_base 20: mod_base = OTHER; note = 2'-O-methyladenosine-3'-phosphate
  modified_base 21: mod_base = OTHER; note = 2'-O-methyladenosine-3'-phosphate N-[tris(GalNAc-alkyl)-amidodecanoyl)]-4-hydroxyprolinol Hyp-(GalNAc-alkyl)3 (2S,4R)-1-[29-[[2-(acetylamino)-2-deoxy-beta-D-galactopyran osyl]oxy]-14,14-bis[[3-[[3-[[5-[[2-(acetylamino)-2-deoxy-be ta-D-galactopyranosyl]oxy]-1-oxopentyl]amino]propyl]amino]- 3-oxopropoxy]methyl]-1,12,19,25-tetraoxo-16-oxa-13,20,24-tr iazanonacos-1-yl]-4-hydroxy-2-hydroxymethylpyrrolidine
taagcctaagttggtctgcaa

SEQ ID NO: 849 - RNA, 21 nt, synthetic construct
  source 1..21: mol_type = other RNA
  modified_base 1: mod_base = OTHER; note = 2'-O-methyladenosine-3'- phosphorothioate
  modified_base 2: mod_base = OTHER; note = 2'-O-methylguanosine-3'- phosphorothioate
  modified_base 3: mod_base = OTHER; note = 2'-O-methylcytidine-3'-phosphate
  modified_base 4: mod_base = OTHER; note = 2'-O-methylcytidine-3'-phosphate
  modified_base 5: mod_base = OTHER; note = 2'-O-methyluridine-3'-phosphate
  modified_base 6: mod_base = OTHER; note = 2'-O-hexadecyl-adenosine-3'-phosphate
  modified_base 7: mod_base = OTHER; note = 2'-fluoroadenosine-3'-phosphate
  modified_base 8: mod_base = OTHER; note = 2'-O-methylguanosine-3'-phosphate
  modified_base 9: mod_base = OTHER; note = 2'-fluorouridine-3'-phosphate
  modified_base 10: mod_base = OTHER; note = 2'-fluorouridine-3'-phosphate
  modified_base 11: mod_base = OTHER; note = 2'-fluoroguanosine-3'-phosphate
  modified_base 12: mod_base = OTHER; note = 2'-O-methylguanosine-3'-phosphate
  modified_base 13: mod_base = OTHER; note = 2'-O-methyluridine-3'-phosphate
  modified_base 14: mod_base = OTHER; note = 2'-O-methylcytidine-3'-phosphate
  modified_base 15: mod_base = OTHER; note = 2'-O-methyluridine-3'-phosphate
  modified_base 16: mod_base = OTHER; note = 2'-O-methylguanosine-3'-phosphate
  modified_base 17: mod_base = OTHER; note = 2'-O-methylcytidine-3'-phosphate
  modified_base 18: mod_base = OTHER; note = 2'-O-methyladenosine-3'-phosphate
  modified_base 19: mod_base = OTHER; note = 2'-O-methylguanosine-3'-phosphate
  modified_base 20: mod_base = OTHER; note = 2'-O-methylguanosine-3'-phosphate
  modified_base 21: mod_base = OTHER; note = 2'-O-methyladenosine-3'-phosphate N-[tris(GalNAc-alkyl)-amidodecanoyl)]-4-hydroxyprolinol Hyp-(GalNAc-alkyl)3 (2S,4R)-1-[29-[[2-(acetylamino)-2-deoxy-beta-D-galactopyran osyl]oxy]-14,14-bis[[3-[[3-[[5-[[2-(acetylamino)-2-deoxy-be ta-D-galactopyranosyl]oxy]-1-oxopentyl]amino]propyl]amino]- 3-oxopropoxy]methyl]-1,12,19,25-tetraoxo-16-oxa-13,20,24-tr iazanonacos-1-yl]-4-hydroxy-2-hydroxymethylpyrrolidine
agcctaagttggtctgcagga

SEQ ID NO: 850 - RNA, 21 nt, synthetic construct
  source 1..21: mol_type = other RNA
  modified_base 1: mod_base = OTHER; note = 2'-O-methylcytidine-3'- phosphorothioate
  modified_base 2: mod_base = OTHER; note = 2'-O-methylcytidine-3'- phosphorothioate
  modified_base 3: mod_base = OTHER; note = 2'-O-methyluridine-3'-phosphate
  modified_base 4: mod_base = OTHER; note = 2'-O-methyladenosine-3'-phosphate
  modified_base 5: mod_base = OTHER; note = 2'-O-methyladenosine-3'-phosphate
  modified_base 6: mod_base = OTHER; note = 2'-O-hexadecyl-guanosine-3'-phosphate
  modified_base 7: mod_base = OTHER; note = 2'-fluorouridine-3'-phosphate
  modified_base 8: mod_base = OTHER; note = 2'-O-methyluridine-3'-phosphate
  modified_base 9: mod_base = OTHER; note = 2'-fluoroguanosine-3'-phosphate
  modified_base 10: mod_base = OTHER; note = 2'-fluoroguanosine-3'-phosphate
  modified_base 11: mod_base = OTHER; note = 2'-fluorouridine-3'-phosphate
  modified_base 12: mod_base = OTHER; note = 2'-O-methylcytidine-3'-phosphate
  modified_base 13: mod_base = OTHER; note = 2'-O-methyluridine-3'-phosphate
  modified_base 14: mod_base = OTHER; note = 2'-O-methylguanosine-3'-phosphate
  modified_base 15: mod_base = OTHER; note = 2'-O-methylcytidine-3'-phosphate
  modified_base 16: mod_base = OTHER; note = 2'-O-methyladenosine-3'-phosphate
  modified_base 17: mod_base = OTHER; note = 2'-O-methylguanosine-3'-phosphate
  modified_base 18: mod_base = OTHER; note = 2'-O-methylguanosine-3'-phosphate
  modified_base 19: mod_base = OTHER; note = 2'-O-methylcytidine-3'-phosphate
  modified_base 20: mod_base = OTHER; note = 2'-O-methylguanosine-3'-phosphate
  modified_base 21: mod_base = OTHER; note = 2'-O-methyladenosine-3'-phosphate N-[tris(GalNAc-alkyl)-amidodecanoyl)]-4-hydroxyprolinol Hyp-(GalNAc-alkyl)3 (2S,4R)-1-[29-[[2-(acetylamino)-2-deoxy-beta-D-galactopyran osyl]oxy]-14,14-bis[[3-[[3-[[5-[[2-(acetylamino)-2-deoxy-be ta-D-galactopyranosyl]oxy]-1-oxopentyl]amino]propyl]amino]- 3-oxopropoxy]methyl]-1,12,19,25-tetraoxo-16-oxa-13,20,24-tr iazanonacos-1-yl]-4-hydroxy-2-hydroxymethylpyrrolidine
cctaagttggtctgcaggcga

SEQ ID NO: 851 - RNA, 21 nt, synthetic construct
  source 1..21: mol_type = other RNA
  modified_base 1: mod_base = OTHER; note = 2'-O-methylcytidine-3'- phosphorothioate
  modified_base 2: mod_base = OTHER; note = 2'-O-methyluridine-3'-phosphorothioate
  modified_base 3: mod_base = OTHER; note = 2'-O-methyladenosine-3'-phosphate
  modified_base 4: mod_base = OTHER; note = 2'-O-methyladenosine-3'-phosphate
  modified_base 5: mod_base = OTHER; note = 2'-O-methylguanosine-3'-phosphate
  modified_base 6: mod_base = OTHER; note = 2'-O-hexadecyl-uridine-3'-phosphate
  modified_base 7: mod_base = OTHER; note = 2'-fluorouridine-3'-phosphate
  modified_base 8: mod_base = OTHER; note = 2'-O-methylguanosine-3'-phosphate
  modified_base 9: mod_base = OTHER; note = 2'-fluoroguanosine-3'-phosphate
  modified_base 10: mod_base = OTHER; note = 2'-fluorouridine-3'-phosphate
  modified_base 11: mod_base = OTHER; note = 2'-fluorocytidine-3'-phosphate
  modified_base 12: mod_base = OTHER; note = 2'-O-methyluridine-3'-phosphate
  modified_base 13: mod_base = OTHER; note = 2'-O-methylguanosine-3'-phosphate
  modified_base 14: mod_base = OTHER; note = 2'-O-methylcytidine-3'-phosphate
  modified_base 15: mod_base = OTHER; note = 2'-O-methyladenosine-3'-phosphate
  modified_base 16: mod_base = OTHER; note = 2'-O-methylguanosine-3'-phosphate
  modified_base 17: mod_base = OTHER; note = 2'-O-methylguanosine-3'-phosphate
  modified_base 18: mod_base = OTHER; note = 2'-O-methylcytidine-3'-phosphate
  modified_base 19: mod_base = OTHER; note = 2'-O-methylguanosine-3'-phosphate
  modified_base 20: mod_base = OTHER; note = 2'-O-methyluridine-3'-phosphate
  modified_base 21: mod_base = OTHER; note = 2'-O-methyladenosine-3'-phosphate N-[tris(GalNAc-alkyl)-amidodecanoyl)]-4-hydroxyprolinol Hyp-(GalNAc-alkyl)3 (2S,4R)-1-[29-[[2-(acetylamino)-2-deoxy-beta-D-galactopyran osyl]oxy]-14,14-bis[[3-[[3-[[5-[[2-(acetylamino)-2-deoxy-be ta-D-galactopyranosyl]oxy]-1-oxopentyl]amino]propyl]amino]- 3-oxopropoxy]methyl]-1,12,19,25-tetraoxo-16-oxa-13,20,24-tr iazanonacos-1-yl]-4-hydroxy-2-hydroxymethylpyrrolidine
ctaagttggtctgcaggcgta

SEQ ID NO: 852 - RNA, 21 nt, synthetic construct
  source 1..21: mol_type = other RNA
  modified_base 1: mod_base = OTHER; note = 2'-O-methyluridine-3'-phosphorothioate
  modified_base 2: mod_base = OTHER; note = 2'-O-methyladenosine-3'- phosphorothioate
  modified_base 3: mod_base = OTHER; note = 2'-O-methyladenosine-3'-phosphate
  modified_base 4: mod_base = OTHER; note = 2'-O-methylguanosine-3'-phosphate
  modified_base 5: mod_base = OTHER; note = 2'-O-methyluridine-3'-phosphate
  modified_base 6: mod_base = OTHER; note = 2'-O-hexadecyl-uridine-3'-phosphate
  modified_base 7: mod_base = OTHER; note = 2'-fluoroguanosine-3'-phosphate
  modified_base 8: mod_base = OTHER; note = 2'-O-methylguanosine-3'-phosphate
  modified_base 9: mod_base = OTHER; note = 2'-fluorouridine-3'-phosphate
  modified_base 10: mod_base = OTHER; note = 2'-fluorocytidine-3'-phosphate
  modified_base 11: mod_base = OTHER; note = 2'-fluorouridine-3'-phosphate
  modified_base 12: mod_base = OTHER; note = 2'-O-methylguanosine-3'-phosphate
  modified_base 13: mod_base = OTHER; note = 2'-O-methylcytidine-3'-phosphate
  modified_base 14: mod_base = OTHER; note = 2'-O-methyladenosine-3'-phosphate
  modified_base 15: mod_base = OTHER; note = 2'-O-methylguanosine-3'-phosphate
  modified_base 16: mod_base = OTHER; note = 2'-O-methylguanosine-3'-phosphate
  modified_base 17: mod_base = OTHER; note = 2'-O-methylcytidine-3'-phosphate
  modified_base 18: mod_base = OTHER; note = 2'-O-methylguanosine-3'-phosphate
  modified_base 19: mod_base = OTHER; note = 2'-O-methyluridine-3'-phosphate
  modified_base 20: mod_base = OTHER; note = 2'-O-methyluridine-3'-phosphate
  modified_base 21: mod_base = OTHER; note = 2'-O-methyladenosine-3'-phosphate N-[tris(GalNAc-alkyl)-amidodecanoyl)]-4-hydroxyprolinol Hyp-(GalNAc-alkyl)3 (2S,4R)-1-[29-[[2-(acetylamino)-2-deoxy-beta-D-galactopyran osyl]oxy]-14,14-bis[[3-[[3-[[5-[[2-(acetylamino)-2-deoxy-be ta-D-galactopyranosyl]oxy]-1-oxopentyl]amino]propyl]amino]- 3-oxopropoxy]methyl]-1,12,19,25-tetraoxo-16-oxa-13,20,24-tr iazanonacos-1-yl]-4-hydroxy-2-hydroxymethylpyrrolidine
taagttggtctgcaggcgtta

SEQ ID NO: 853 - RNA, 21 nt, synthetic construct
  source 1..21: mol_type = other RNA
  modified_base 1: mod_base = OTHER; note = 2'-O-methyluridine-3'-phosphorothioate
  modified_base 2: mod_base = OTHER; note = 2'-O-methyladenosine-3'- phosphorothioate
  modified_base 3: mod_base = OTHER; note = 2'-O-methyladenosine-3'-phosphate
  modified_base 4: mod_base = OTHER; note = 2'-O-methylguanosine-3'-phosphate
  modified_base 5: mod_base = OTHER; note = 2'-O-methyluridine-3'-phosphate
  modified_base 6: mod_base = OTHER; note = 2'-O-hexadecyl-uridine-3'-phosphate
  modified_base 7: mod_base = OTHER; note = 2'-O-methylguanosine-3'-phosphate
  modified_base 8: mod_base = OTHER; note = 2'-O-methylguanosine-3'-phosphate
  modified_base 9: mod_base = OTHER; note = 2'-fluorouridine-3'-phosphate
  modified_base 10: mod_base = OTHER; note = 2'-fluorocytidine-3'-phosphate
  modified_base 11: mod_base = OTHER; note = 2'-fluorouridine-3'-phosphate
  modified_base 12: mod_base = OTHER; note = 2'-O-methylguanosine-3'-phosphate
  modified_base 13: mod_base = OTHER; note = 2'-O-methylcytidine-3'-phosphate
  modified_base 14: mod_base = OTHER; note = 2'-O-methyladenosine-3'-phosphate
  modified_base 15: mod_base = OTHER; note = 2'-O-methylguanosine-3'-phosphate
  modified_base 16: mod_base = OTHER; note = 2'-O-methylguanosine-3'-phosphate
  modified_base 17: mod_base = OTHER; note = 2'-O-methylcytidine-3'-phosphate
  modified_base 18: mod_base = OTHER; note = 2'-O-methylguanosine-3'-phosphate
  modified_base 19: mod_base = OTHER; note = 2'-O-methyluridine-3'-phosphate
  modified_base 20: mod_base = OTHER; note = 2'-O-methyluridine-3'-phosphate
  modified_base 21: mod_base = OTHER; note = 2'-O-methyladenosine-3'-phosphate N-[tris(GalNAc-alkyl)-amidodecanoyl)]-4-hydroxyprolinol Hyp-(GalNAc-alkyl)3 (2S,4R)-1-[29-[[2-(acetylamino)-2-deoxy-beta-D-galactopyran osyl]oxy]-14,14-bis[[3-[[3-[[5-[[2-(acetylamino)-2-deoxy-be ta-D-galactopyranosyl]oxy]-1-oxopentyl]amino]propyl]amino]- 3-oxopropoxy]methyl]-1,12,19,25-tetraoxo-16-oxa-13,20,24-tr iazanonacos-1-yl]-4-hydroxy-2-hydroxymethylpyrrolidine
taagttggtctgcaggcgtta

SEQ ID NO: 854 - RNA, 21 nt, synthetic construct
  source 1..21: mol_type = other RNA
  modified_base 1: mod_base = OTHER; note = 2'-O-methyladenosine-3'- phosphorothioate
  modified_base 2: mod_base = OTHER; note = 2'-O-methylguanosine-3'- phosphorothioate
  modified_base 3: mod_base = OTHER; note = 2'-O-methyluridine-3'-phosphate
  modified_base 4: mod_base = OTHER; note = 2'-O-methyluridine-3'-phosphate
  modified_base 5: mod_base = OTHER; note = 2'-O-methylguanosine-3'-phosphate
  modified_base 6: mod_base = OTHER; note = 2'-O-hexadecyl-guanosine-3'-phosphate
  modified_base 7: mod_base = OTHER; note = 2'-fluorouridine-3'-phosphate
  modified_base 8: mod_base = OTHER; note = 2'-O-methylcytidine-3'-phosphate
  modified_base 9: mod_base = OTHER; note = 2'-fluorouridine-3'-phosphate
  modified_base 10: mod_base = OTHER; note = 2'-fluoroguanosine-3'-phosphate
  modified_base 11: mod_base = OTHER; note = 2'-fluorocytidine-3'-phosphate
  modified_base 12: mod_base = OTHER; note = 2'-O-methyladenosine-3'-phosphate
  modified_base 13: mod_base = OTHER; note = 2'-O-methylguanosine-3'-phosphate
  modified_base 14: mod_base = OTHER; note = 2'-O-methylguanosine-3'-phosphate
  modified_base 15: mod_base = OTHER; note = 2'-O-methylcytidine-3'-phosphate
  modified_base 16: mod_base = OTHER; note = 2'-O-methylguanosine-3'-phosphate
  modified_base 17: mod_base = OTHER; note = 2'-O-methyluridine-3'-phosphate
  modified_base 18: mod_base = OTHER; note = 2'-O-methyluridine-3'-phosphate
  modified_base 19: mod_base = OTHER; note = 2'-O-methyluridine-3'-phosphate
  modified_base 20: mod_base = OTHER; note = 2'-O-methylguanosine-3'-phosphate
  modified_base 21: mod_base = OTHER; note = 2'-O-methyladenosine-3'-phosphate N-[tris(GalNAc-alkyl)-amidodecanoyl)]-4-hydroxyprolinol Hyp-(GalNAc-alkyl)3 (2S,4R)-1-[29-[[2-(acetylamino)-2-deoxy-beta-D-galactopyran osyl]oxy]-14,14-bis[[3-[[3-[[5-[[2-(acetylamino)-2-deoxy-be ta-D-galactopyranosyl]oxy]-1-oxopentyl]amino]propyl]amino]- 3-oxopropoxy]methyl]-1,12,19,25-tetraoxo-16-oxa-13,20,24-tr iazanonacos-1-yl]-4-hydroxy-2-hydroxymethylpyrrolidine
agttggtctgcaggcgtttga

SEQ ID NO: 855 - RNA, 21 nt, synthetic construct
  source 1..21: mol_type = other RNA
  modified_base 1: mod_base = OTHER; note = 2'-O-methyladenosine-3'- phosphorothioate
  modified_base 2: mod_base = OTHER; note = 2'-O-methylguanosine-3'- phosphorothioate
  modified_base 3: mod_base = OTHER; note = 2'-O-methyluridine-3'-phosphate
  modified_base 4: mod_base = OTHER; note = 2'-O-methyluridine-3'-phosphate
  modified_base 5: mod_base = OTHER; note = 2'-O-methylguanosine-3'-phosphate
  modified_base 6: mod_base = OTHER; note = 2'-O-hexadecyl-guanosine-3'-phosphate
  modified_base 7: mod_base = OTHER; note = 2'-O-methyluridine-3'-phosphate
  modified_base 8: mod_base = OTHER; note = 2'-O-methylcytidine-3'-phosphate
  modified_base 9: mod_base = OTHER; note = 2'-fluorouridine-3'-phosphate
  modified_base 10: mod_base = OTHER; note = 2'-fluoroguanosine-3'-phosphate
  modified_base 11: mod_base = OTHER; note = 2'-fluorocytidine-3'-phosphate
  modified_base 12: mod_base = OTHER; note = 2'-O-methyladenosine-3'-phosphate
  modified_base 13: mod_base = OTHER; note = 2'-O-methylguanosine-3'-phosphate
  modified_base 14: mod_base = OTHER; note = 2'-O-methylguanosine-3'-phosphate
  modified_base 15: mod_base = OTHER; note = 2'-O-methylcytidine-3'-phosphate
  modified_base 16: mod_base = OTHER; note = 2'-O-methylguanosine-3'-phosphate
  modified_base 17: mod_base = OTHER; note = 2'-O-methyluridine-3'-phosphate
  modified_base 18: mod_base = OTHER; note = 2'-O-methyluridine-3'-phosphate
  modified_base 19: mod_base = OTHER; note = 2'-O-methyluridine-3'-phosphate
  modified_base 20: mod_base = OTHER; note = 2'-O-methylguanosine-3'-phosphate
  modified_base 21: mod_base = OTHER; note = 2'-O-methyladenosine-3'-phosphate N-[tris(GalNAc-alkyl)-amidodecanoyl)]-4-hydroxyprolinol Hyp-(GalNAc-alkyl)3 (2S,4R)-1-[29-[[2-(acetylamino)-2-deoxy-beta-D-galactopyran osyl]oxy]-14,14-bis[[3-[[3-[[5-[[2-(acetylamino)-2-deoxy-be ta-D-galactopyranosyl]oxy]-1-oxopentyl]amino]propyl]amino]- 3-oxopropoxy]methyl]-1,12,19,25-tetraoxo-16-oxa-13,20,24-tr iazanonacos-1-yl]-4-hydroxy-2-hydroxymethylpyrrolidine
agttggtctgcaggcgtttga

SEQ ID NO: 856 - RNA, 21 nt, synthetic construct
  source 1..21: mol_type = other RNA
  modified_base 1: mod_base = OTHER; note = 2'-O-methyluridine-3'-phosphorothioate
  modified_base 2: mod_base = OTHER; note = 2'-O-methylguanosine-3'- phosphorothioate
  modified_base 3: mod_base = OTHER; note = 2'-O-methylguanosine-3'-phosphate
  modified_base 4: mod_base = OTHER; note = 2'-O-methyluridine-3'-phosphate
  modified_base 5: mod_base = OTHER; note = 2'-O-methylcytidine-3'-phosphate
  modified_base 6: mod_base = OTHER; note = 2'-O-hexadecyl-uridine-3'-phosphate
  modified_base 7: mod_base = OTHER; note = 2'-fluoroguanosine-3'-phosphate
  modified_base 8: mod_base = OTHER; note = 2'-O-methylcytidine-3'-phosphate
  modified_base 9: mod_base = OTHER; note = 2'-fluoroadenosine-3'-phosphate
  modified_base 10: mod_base = OTHER; note = 2'-fluoroguanosine-3'-phosphate
  modified_base 11: mod_base = OTHER; note = 2'-fluoroguanosine-3'-phosphate
  modified_base 12: mod_base = OTHER; note = 2'-O-methylcytidine-3'-phosphate
  modified_base 13: mod_base = OTHER; note = 2'-O-methylguanosine-3'-phosphate
  modified_base 14: mod_base = OTHER; note = 2'-O-methyluridine-3'-phosphate
  modified_base 15: mod_base = OTHER; note = 2'-O-methyluridine-3'-phosphate
  modified_base 16: mod_base = OTHER; note = 2'-O-methyluridine-3'-phosphate
  modified_base 17: mod_base = OTHER; note = 2'-O-methylguanosine-3'-phosphate
  modified_base 18: mod_base = OTHER; note = 2'-O-methyladenosine-3'-phosphate
  modified_base 19: mod_base = OTHER; note = 2'-O-methyladenosine-3'-phosphate
  modified_base 20: mod_base = OTHER; note = 2'-O-methyluridine-3'-phosphate
  modified_base 21: mod_base = OTHER; note = 2'-O-methyladenosine-3'-phosphate N-[tris(GalNAc-alkyl)-amidodecanoyl)]-4-hydroxyprolinol Hyp-(GalNAc-alkyl)3 (2S,4R)-1-[29-[[2-(acetylamino)-2-deoxy-beta-D-galactopyran osyl]oxy]-14,14-bis[[3-[[3-[[5-[[2-(acetylamino)-2-deoxy-be ta-D-galactopyranosyl]oxy]-1-oxopentyl]amino]propyl]amino]- 3-oxopropoxy]methyl]-1,12,19,25-tetraoxo-16-oxa-13,20,24-tr iazanonacos-1-yl]-4-hydroxy-2-hydroxymethylpyrrolidine
tggtctgcaggcgtttgaata

SEQ ID NO: 857 - RNA, 21 nt, synthetic construct
  source 1..21: mol_type = other RNA
  modified_base 1: mod_base = OTHER; note = 2'-O-methyluridine-3'-phosphorothioate
  modified_base 2: mod_base = OTHER; note = 2'-O-methylguanosine-3'- phosphorothioate
  modified_base 3: mod_base = OTHER; note = 2'-O-methylguanosine-3'-phosphate
  modified_base 4: mod_base = OTHER; note = 2'-O-methyluridine-3'-phosphate
  modified_base 5: mod_base = OTHER; note = 2'-O-methylcytidine-3'-phosphate
  modified_base 6: mod_base = OTHER; note = 2'-O-hexadecyl-uridine-3'-phosphate
  modified_base 7: mod_base = OTHER; note = 2'-O-methylguanosine-3'-phosphate
  modified_base 8: mod_base = OTHER; note = 2'-O-methylcytidine-3'-phosphate
  modified_base 9: mod_base = OTHER; note = 2'-fluoroadenosine-3'-phosphate
  modified_base 10: mod_base = OTHER; note = 2'-fluoroguanosine-3'-phosphate
  modified_base 11: mod_base = OTHER; note = 2'-fluoroguanosine-3'-phosphate
  modified_base 12: mod_base = OTHER; note = 2'-O-methylcytidine-3'-phosphate
  modified_base 13: mod_base = OTHER; note = 2'-O-methylguanosine-3'-phosphate
  modified_base 14: mod_base = OTHER; note = 2'-O-methyluridine-3'-phosphate
  modified_base 15: mod_base = OTHER; note = 2'-O-methyluridine-3'-phosphate
  modified_base 16: mod_base = OTHER; note = 2'-O-methyluridine-3'-phosphate
  modified_base 17: mod_base = OTHER; note = 2'-O-methylguanosine-3'-phosphate
  modified_base 18: mod_base = OTHER; note = 2'-O-methyladenosine-3'-phosphate
  modified_base 19: mod_base = OTHER; note = 2'-O-methyladenosine-3'-phosphate
  modified_base 20: mod_base = OTHER; note = 2'-O-methyluridine-3'-phosphate
  modified_base 21: mod_base = OTHER; note = 2'-O-methyladenosine-3'-phosphate N-[tris(GalNAc-alkyl)-amidodecanoyl)]-4-hydroxyprolinol Hyp-(GalNAc-alkyl)3 (2S,4R)-1-[29-[[2-(acetylamino)-2-deoxy-beta-D-galactopyran osyl]oxy]-14,14-bis[[3-[[3-[[5-[[2-(acetylamino)-2-deoxy-be ta-D-galactopyranosyl]oxy]-1-oxopentyl]amino]propyl]amino]- 3-oxopropoxy]methyl]-1,12,19,25-tetraoxo-16-oxa-13,20,24-tr iazanonacos-1-yl]-4-hydroxy-2-hydroxymethylpyrrolidine
tggtctgcaggcgtttgaata

SEQ ID NO: 858 - RNA, 21 nt, synthetic construct
  source 1..21: mol_type = other RNA
  modified_base 1: mod_base = OTHER; note = 2'-O-methylguanosine-3'- phosphorothioate
  modified_base 2: mod_base = OTHER; note = 2'-O-methylguanosine-3'- phosphorothioate
  modified_base 3: mod_base = OTHER; note = 2'-O-methyluridine-3'-phosphate
  modified_base 4: mod_base = OTHER; note = 2'-O-methylcytidine-3'-phosphate
  modified_base 5: mod_base = OTHER; note = 2'-O-methyluridine-3'-phosphate
  modified_base 6: mod_base = OTHER; note = 2'-O-hexadecyl-guanosine-3'-phosphate
  modified_base 7: mod_base = OTHER; note = 2'-fluorocytidine-3'-phosphate
  modified_base 8: mod_base = OTHER; note = 2'-O-methyladenosine-3'-phosphate
  modified_base 9: mod_base = OTHER; note = 2'-fluoroguanosine-3'-phosphate
  modified_base 10: mod_base = OTHER; note = 2'-fluoroguanosine-3'-phosphate
  modified_base 11: mod_base = OTHER; note = 2'-fluorocytidine-3'-phosphate
  modified_base 12: mod_base = OTHER; note = 2'-O-methylguanosine-3'-phosphate
  modified_base 13: mod_base = OTHER; note = 2'-O-methyluridine-3'-phosphate
  modified_base 14: mod_base = OTHER; note = 2'-O-methyluridine-3'-phosphate
  modified_base 15: mod_base = OTHER; note = 2'-O-methyluridine-3'-phosphate
  modified_base 16: mod_base = OTHER; note = 2'-O-methylguanosine-3'-phosphate
  modified_base 17: mod_base = OTHER; note = 2'-O-methyladenosine-3'-phosphate
  modified_base 18: mod_base = OTHER; note = 2'-O-methyladenosine-3'-phosphate
  modified_base 19: mod_base = OTHER; note = 2'-O-methyluridine-3'-phosphate
  modified_base 20: mod_base = OTHER; note = 2'-O-methylguanosine-3'-phosphate
  modified_base 21: mod_base = OTHER; note = 2'-O-methyladenosine-3'-phosphate N-[tris(GalNAc-alkyl)-amidodecanoyl)]-4-hydroxyprolinol Hyp-(GalNAc-alkyl)3 (2S,4R)-1-[29-[[2-(acetylamino)-2-deoxy-beta-D-galactopyran osyl]oxy]-14,14-bis[[3-[[3-[[5-[[2-(acetylamino)-2-deoxy-be ta-D-galactopyranosyl]oxy]-1-oxopentyl]amino]propyl]amino]- 3-oxopropoxy]methyl]-1,12,19,25-tetraoxo-16-oxa-13,20,24-tr iazanonacos-1-yl]-4-hydroxy-2-hydroxymethylpyrrolidine
ggtctgcaggcgtttgaatga

SEQ ID NO: 859 - RNA, 21 nt, synthetic construct
  source 1..21: mol_type = other RNA
  modified_base 1: mod_base = OTHER; note = 2'-O-methylguanosine-3'- phosphorothioate
  modified_base 2: mod_base = OTHER; note = 2'-O-methylguanosine-3'- phosphorothioate
  modified_base 3: mod_base = OTHER; note = 2'-O-methyluridine-3'-phosphate
  modified_base 4: mod_base = OTHER; note = 2'-O-methylcytidine-3'-phosphate
  modified_base 5: mod_base = OTHER; note = 2'-O-methyluridine-3'-phosphate
  modified_base 6: mod_base = OTHER; note = 2'-O-hexadecyl-guanosine-3'-phosphate
  modified_base 7: mod_base = OTHER; note = 2'-O-methylcytidine-3'-phosphate
  modified_base 8: mod_base = OTHER; note = 2'-O-methyladenosine-3'-phosphate
  modified_base 9: mod_base = OTHER; note = 2'-fluoroguanosine-3'-phosphate
  modified_base 10: mod_base = OTHER; note = 2'-fluoroguanosine-3'-phosphate
  modified_base 11: mod_base = OTHER; note = 2'-fluorocytidine-3'-phosphate
  modified_base 12: mod_base = OTHER; note = 2'-O-methylguanosine-3'-phosphate
  modified_base 13: mod_base = OTHER; note = 2'-O-methyluridine-3'-phosphate
  modified_base 14: mod_base = OTHER; note = 2'-O-methyluridine-3'-phosphate
  modified_base 15: mod_base = OTHER; note = 2'-O-methyluridine-3'-phosphate
  modified_base 16: mod_base = OTHER; note = 2'-O-methylguanosine-3'-phosphate
  modified_base 17: mod_base = OTHER; note = 2'-O-methyladenosine-3'-phosphate
  modified_base 18: mod_base = OTHER; note = 2'-O-methyladenosine-3'-phosphate
  modified_base 19: mod_base = OTHER; note = 2'-O-methyluridine-3'-phosphate
  modified_base 20: mod_base = OTHER; note = 2'-O-methylguanosine-3'-phosphate
  modified_base 21: mod_base = OTHER; note = 2'-O-methyladenosine-3'-phosphate N-[tris(GalNAc-alkyl)-amidodecanoyl)]-4-hydroxyprolinol Hyp-(GalNAc-alkyl)3 (2S,4R)-1-[29-[[2-(acetylamino)-2-deoxy-beta-D-galactopyran osyl]oxy]-14,14-bis[[3-[[3-[[5-[[2-(acetylamino)-2-deoxy-be ta-D-galactopyranosyl]oxy]-1-oxopentyl]amino]propyl]amino]- 3-oxopropoxy]methyl]-1,12,19,25-tetraoxo-16-oxa-13,20,24-tr iazanonacos-1-yl]-4-hydroxy-2-hydroxymethylpyrrolidine
ggtctgcaggcgtttgaatga

SEQ ID NO: 860 - RNA, 21 nt, synthetic construct
  source 1..21: mol_type = other RNA
  modified_base 1: mod_base = OTHER; note = 2'-O-methyluridine-3'-phosphorothioate
  modified_base 2: mod_base = OTHER; note = 2'-O-methylcytidine-3'- phosphorothioate
  modified_base 3: mod_base = OTHER; note = 2'-O-methyluridine-3'-phosphate
  modified_base 4: mod_base = OTHER; note = 2'-O-methylguanosine-3'-phosphate
  modified_base 5: mod_base = OTHER; note = 2'-O-methylcytidine-3'-phosphate
  modified_base 6: mod_base = OTHER; note = 2'-O-hexadecyl-adenosine-3'-phosphate
  modified_base 7: mod_base = OTHER; note = 2'-fluoroguanosine-3'-phosphate
  modified_base 8: mod_base = OTHER; note = 2'-O-methylguanosine-3'-phosphate
  modified_base 9: mod_base = OTHER; note = 2'-fluorocytidine-3'-phosphate
  modified_base 10: mod_base = OTHER; note = 2'-fluoroguanosine-3'-phosphate
  modified_base 11: mod_base = OTHER; note = 2'-fluorouridine-3'-phosphate
  modified_base 12: mod_base = OTHER; note = 2'-O-methyluridine-3'-phosphate
  modified_base 13: mod_base = OTHER; note = 2'-O-methyluridine-3'-phosphate
  modified_base 14: mod_base = OTHER; note = 2'-O-methylguanosine-3'-phosphate
  modified_base 15: mod_base = OTHER; note = 2'-O-methyladenosine-3'-phosphate
  modified_base 16: mod_base = OTHER; note = 2'-O-methyladenosine-3'-phosphate
  modified_base 17: mod_base = OTHER; note = 2'-O-methyluridine-3'-phosphate
  modified_base 18: mod_base = OTHER; note = 2'-O-methylguanosine-3'-phosphate
  modified_base 19: mod_base = OTHER; note = 2'-O-methyladenosine-3'-phosphate
  modified_base 20: mod_base = OTHER; note = 2'-O-methylguanosine-3'-phosphate
  modified_base 21: mod_base = OTHER; note = 2'-O-methyladenosine-3'-phosphate N-[tris(GalNAc-alkyl)-amidodecanoyl)]-4-hydroxyprolinol Hyp-(GalNAc-alkyl)3 (2S,4R)-1-[29-[[2-(acetylamino)-2-deoxy-beta-D-galactopyran osyl]oxy]-14,14-bis[[3-[[3-[[5-[[2-(acetylamino)-2-deoxy-be ta-D-galactopyranosyl]oxy]-1-oxopentyl]amino]propyl]amino]- 3-oxopropoxy]methyl]-1,12,19,25-tetraoxo-16-oxa-13,20,24-tr iazanonacos-1-yl]-4-hydroxy-2-hydroxymethylpyrrolidine
tctgcaggcgtttgaatgaga

SEQ ID NO: 861 - RNA, 21 nt, synthetic construct
  source 1..21: mol_type = other RNA
  modified_base 1: mod_base = OTHER; note = 2'-O-methyluridine-3'-phosphorothioate
  modified_base 2: mod_base = OTHER; note = 2'-O-methylcytidine-3'- phosphorothioate
  modified_base 3: mod_base = OTHER; note = 2'-O-methyluridine-3'-phosphate
  modified_base 4: mod_base = OTHER; note = 2'-O-methylguanosine-3'-phosphate
  modified_base 5: mod_base = OTHER; note = 2'-O-methylcytidine-3'-phosphate
  modified_base 6: mod_base = OTHER; note = 2'-O-hexadecyl-adenosine-3'-phosphate
  modified_base 7: mod_base = OTHER; note = 2'-O-methylguanosine-3'-phosphate
  modified_base 8: mod_base = OTHER; note = 2'-O-methylguanosine-3'-phosphate
  modified_base 9: mod_base = OTHER; note = 2'-fluorocytidine-3'-phosphate
  modified_base 10: mod_base = OTHER; note = 2'-fluoroguanosine-3'-phosphate
  modified_base 11: mod_base = OTHER; note = 2'-fluorouridine-3'-phosphate
  modified_base 12: mod_base = OTHER; note = 2'-O-methyluridine-3'-phosphate
  modified_base 13: mod_base = OTHER; note = 2'-O-methyluridine-3'-phosphate
  modified_base 14: mod_base = OTHER; note = 2'-O-methylguanosine-3'-phosphate
  modified_base 15: mod_base = OTHER; note = 2'-O-methyladenosine-3'-phosphate
  modified_base 16: mod_base = OTHER; note = 2'-O-methyladenosine-3'-phosphate
  modified_base 17: mod_base = OTHER; note = 2'-O-methyluridine-3'-phosphate
  modified_base 18: mod_base = OTHER; note = 2'-O-methylguanosine-3'-phosphate
  modified_base 19: mod_base = OTHER; note = 2'-O-methyladenosine-3'-phosphate
  modified_base 20: mod_base = OTHER; note = 2'-O-methylguanosine-3'-phosphate
  modified_base 21: mod_base = OTHER; note = 2'-O-methyladenosine-3'-phosphate N-[tris(GalNAc-alkyl)-amidodecanoyl)]-4-hydroxyprolinol Hyp-(GalNAc-alkyl)3 (2S,4R)-1-[29-[[2-(acetylamino)-2-deoxy-beta-D-galactopyran osyl]oxy]-14,14-bis[[3-[[3-[[5-[[2-(acetylamino)-2-deoxy-be ta-D-galactopyranosyl]oxy]-1-oxopentyl]amino]propyl]amino]- 3-oxopropoxy]methyl]-1,12,19,25-tetraoxo-16-oxa-13,20,24-tr iazanonacos-1-yl]-4-hydroxy-2-hydroxymethylpyrrolidine
tctgcaggcgtttgaatgaga

SEQ ID NO: 862 - RNA, 21 nt, synthetic construct
  source 1..21: mol_type = other RNA
  modified_base 1: mod_base = OTHER; note = 2'-O-methylcytidine-3'- phosphorothioate
  modified_base 2: mod_base = OTHER; note = 2'-O-methyluridine-3'-phosphorothioate
  modified_base 3: mod_base = OTHER; note = 2'-O-methylguanosine-3'-phosphate
  modified_base 4: mod_base = OTHER; note = 2'-O-methylcytidine-3'-phosphate
  modified_base 5: mod_base = OTHER; note = 2'-O-methyladenosine-3'-phosphate
  modified_base 6: mod_base = OTHER; note = 2'-O-hexadecyl-guanosine-3'-phosphate
  modified_base 7: mod_base = OTHER; note = 2'-fluoroguanosine-3'-phosphate
  modified_base 8: mod_base = OTHER; note = 2'-O-methylcytidine-3'-phosphate
  modified_base 9: mod_base = OTHER; note = 2'-fluoroguanosine-3'-phosphate
  modified_base 10: mod_base = OTHER; note = 2'-fluorouridine-3'-phosphate
  modified_base 11: mod_base = OTHER; note = 2'-fluorouridine-3'-phosphate
  modified_base 12: mod_base = OTHER; note = 2'-O-methyluridine-3'-phosphate
  modified_base 13: mod_base = OTHER; note = 2'-O-methylguanosine-3'-phosphate
  modified_base 14: mod_base = OTHER; note = 2'-O-methyladenosine-3'-phosphate
  modified_base 15: mod_base = OTHER; note = 2'-O-methyladenosine-3'-phosphate
  modified_base 16: mod_base = OTHER; note = 2'-O-methyluridine-3'-phosphate
  modified_base 17: mod_base = OTHER; note = 2'-O-methylguanosine-3'-phosphate
  modified_base 18: mod_base = OTHER; note = 2'-O-methyladenosine-3'-phosphate
  modified_base 19: mod_base = OTHER; note = 2'-O-methylguanosine-3'-phosphate
  modified_base 20: mod_base = OTHER; note = 2'-O-methyluridine-3'-phosphate
  modified_base 21: mod_base = OTHER; note = 2'-O-methyladenosine-3'-phosphate N-[tris(GalNAc-alkyl)-amidodecanoyl)]-4-hydroxyprolinol Hyp-(GalNAc-alkyl)3 (2S,4R)-1-[29-[[2-(acetylamino)-2-deoxy-beta-D-galactopyran osyl]oxy]-14,14-bis[[3-[[3-[[5-[[2-(acetylamino)-2-deoxy-be ta-D-galactopyranosyl]oxy]-1-oxopentyl]amino]propyl]amino]- 3-oxopropoxy]methyl]-1,12,19,25-tetraoxo-16-oxa-13,20,24-tr iazanonacos-1-yl]-4-hydroxy-2-hydroxymethylpyrrolidine
ctgcaggcgtttgaatgagta

SEQ ID NO: 863 - RNA, 21 nt, synthetic construct
  source 1..21: mol_type = other RNA
  modified_base 1: mod_base = OTHER; note = 2'-O-methylcytidine-3'- phosphorothioate
  modified_base 2: mod_base = OTHER; note = 2'-O-methyluridine-3'-phosphorothioate
  modified_base 3: mod_base = OTHER; note = 2'-O-methylguanosine-3'-phosphate
  modified_base 4: mod_base = OTHER; note = 2'-O-methylcytidine-3'-phosphate
  modified_base 5: mod_base = OTHER; note = 2'-O-methyladenosine-3'-phosphate
  modified_base 6: mod_base = OTHER; note = 2'-O-hexadecyl-guanosine-3'-phosphate
  modified_base 7: mod_base = OTHER; note = 2'-O-methylguanosine-3'-phosphate
  modified_base 8: mod_base = OTHER; note = 2'-O-methylcytidine-3'-phosphate
  modified_base 9: mod_base = OTHER; note = 2'-fluoroguanosine-3'-phosphate
  modified_base 10: mod_base = OTHER; note = 2'-fluorouridine-3'-phosphate
  modified_base 11: mod_base = OTHER; note = 2'-fluorouridine-3'-phosphate
  modified_base 12: mod_base = OTHER; note = 2'-O-methyluridine-3'-phosphate
  modified_base 13: mod_base = OTHER; note = 2'-O-methylguanosine-3'-phosphate
  modified_base 14: mod_base = OTHER; note = 2'-O-methyladenosine-3'-phosphate
  modified_base 15: mod_base = OTHER; note = 2'-O-methyladenosine-3'-phosphate
  modified_base 16: mod_base = OTHER; note = 2'-O-methyluridine-3'-phosphate
  modified_base 17: mod_base = OTHER; note = 2'-O-methylguanosine-3'-phosphate
  modified_base 18: mod_base = OTHER; note = 2'-O-methyladenosine-3'-phosphate
  modified_base 19: mod_base = OTHER; note = 2'-O-methylguanosine-3'-phosphate
  modified_base 20: mod_base = OTHER; note = 2'-O-methyluridine-3'-phosphate
  modified_base 21: mod_base = OTHER; note = 2'-O-methyladenosine-3'-phosphate N-[tris(GalNAc-alkyl)-amidodecanoyl)]-4-hydroxyprolinol Hyp-(GalNAc-alkyl)3 (2S,4R)-1-[29-[[2-(acetylamino)-2-deoxy-beta-D-galactopyran osyl]oxy]-14,14-bis[[3-[[3-[[5-[[2-(acetylamino)-2-deoxy-be ta-D-galactopyranosyl]oxy]-1-oxopentyl]amino]propyl]amino]- 3-oxopropoxy]methyl]-1,12,19,25-tetraoxo-16-oxa-13,20,24-tr iazanonacos-1-yl]-4-hydroxy-2-hydroxymethylpyrrolidine
ctgcaggcgtttgaatgagta

SEQ ID NO: 864 - RNA, 21 nt, synthetic construct
  source 1..21: mol_type = other RNA
  modified_base 1: mod_base = OTHER; note = 2'-O-methyluridine-3'-phosphorothioate
  modified_base 2: mod_base = OTHER; note = 2'-O-methylguanosine-3'- phosphorothioate
  modified_base 3: mod_base = OTHER; note = 2'-O-methylcytidine-3'-phosphate
  modified_base 4: mod_base = OTHER; note = 2'-O-methyladenosine-3'-phosphate
  modified_base 5: mod_base = OTHER; note = 2'-O-methylguanosine-3'-phosphate
  modified_base 6: mod_base = OTHER; note = 2'-O-hexadecyl-guanosine-3'-phosphate
  modified_base 7: mod_base = OTHER; note = 2'-fluorocytidine-3'-phosphate
  modified_base 8: mod_base = OTHER; note = 2'-O-methylguanosine-3'-phosphate
  modified_base 9: mod_base = OTHER; note = 2'-fluorouridine-3'-phosphate
  modified_base 10: mod_base = OTHER; note = 2'-fluorouridine-3'-phosphate
  modified_base 11: mod_base = OTHER; note = 2'-fluorouridine-3'-phosphate
  modified_base 12: mod_base = OTHER; note = 2'-O-methylguanosine-3'-phosphate
  modified_base 13: mod_base = OTHER; note = 2'-O-methyladenosine-3'-phosphate
  modified_base 14: mod_base = OTHER; note = 2'-O-methyladenosine-3'-phosphate
  modified_base 15: mod_base = OTHER; note = 2'-O-methyluridine-3'-phosphate
  modified_base 16: mod_base = OTHER; note = 2'-O-methylguanosine-3'-phosphate
  modified_base 17: mod_base = OTHER; note = 2'-O-methyladenosine-3'-phosphate
  modified_base 18: mod_base = OTHER; note = 2'-O-methylguanosine-3'-phosphate
  modified_base 19: mod_base = OTHER; note = 2'-O-methyluridine-3'-phosphate
  modified_base 20: mod_base = OTHER; note = 2'-O-methyluridine-3'-phosphate
  modified_base 21: mod_base = OTHER; note = 2'-O-methyladenosine-3'-phosphate N-[tris(GalNAc-alkyl)-amidodecanoyl)]-4-hydroxyprolinol Hyp-(GalNAc-alkyl)3 (2S,4R)-1-[29-[[2-(acetylamino)-2-deoxy-beta-D-galactopyran osyl]oxy]-14,14-bis[[3-[[3-[[5-[[2-(acetylamino)-2-deoxy-be ta-D-galactopyranosyl]oxy]-1-oxopentyl]amino]propyl]amino]- 3-oxopropoxy]methyl]-1,12,19,25-tetraoxo-16-oxa-13,20,24-tr iazanonacos-1-yl]-4-hydroxy-2-hydroxymethylpyrrolidine
tgcaggcgtttgaatgagtta

SEQ ID NO: 865 - RNA, 21 nt, synthetic construct
  source 1..21: mol_type = other RNA
  modified_base 1: mod_base = OTHER; note = 2'-O-methylguanosine-3'- phosphorothioate
  modified_base 2: mod_base = OTHER; note = 2'-O-methylcytidine-3'- phosphorothioate
  modified_base 3: mod_base = OTHER; note = 2'-O-methyladenosine-3'-phosphate
  modified_base 4: mod_base = OTHER; note = 2'-O-methylguanosine-3'-phosphate
  modified_base 5: mod_base = OTHER; note = 2'-O-methylguanosine-3'-phosphate
  modified_base 6: mod_base = OTHER; note = 2'-O-hexadecyl-cytidine-3'-phosphate
  modified_base 7: mod_base = OTHER; note = 2'-fluoroguanosine-3'-phosphate
  modified_base 8: mod_base = OTHER; note = 2'-O-methyluridine-3'-phosphate
  modified_base 9: mod_base = OTHER; note = 2'-fluorouridine-3'-phosphate
  modified_base 10: mod_base = OTHER; note = 2'-fluorouridine-3'-phosphate
  modified_base 11: mod_base = OTHER; note = 2'-fluoroguanosine-3'-phosphate
  modified_base 12: mod_base = OTHER; note = 2'-O-methyladenosine-3'-phosphate
  modified_base 13: mod_base = OTHER; note = 2'-O-methyladenosine-3'-phosphate
  modified_base 14: mod_base = OTHER; note = 2'-O-methyluridine-3'-phosphate
  modified_base 15: mod_base = OTHER; note = 2'-O-methylguanosine-3'-phosphate
  modified_base 16: mod_base = OTHER; note = 2'-O-methyladenosine-3'-phosphate
  modified_base 17: mod_base = OTHER; note = 2'-O-methylguanosine-3'-phosphate
  modified_base 18: mod_base = OTHER; note = 2'-O-methyluridine-3'-phosphate
  modified_base 19: mod_base = OTHER; note = 2'-O-methyluridine-3'-phosphate
  modified_base 20: mod_base = OTHER; note = 2'-O-methylguanosine-3'-phosphate
  modified_base 21: mod_base = OTHER; note = 2'-O-methyladenosine-3'-phosphate N-[tris(GalNAc-alkyl)-amidodecanoyl)]-4-hydroxyprolinol Hyp-(GalNAc-alkyl)3 (2S,4R)-1-[29-[[2-(acetylamino)-2-deoxy-beta-D-galactopyran osyl]oxy]-14,14-bis[[3-[[3-[[5-[[2-(acetylamino)-2-deoxy-be ta-D-galactopyranosyl]oxy]-1-oxopentyl]amino]propyl]amino]- 3-oxopropoxy]methyl]-1,12,19,25-tetraoxo-16-oxa-13,20,24-tr iazanonacos-1-yl]-4-hydroxy-2-hydroxymethylpyrrolidine
gcaggcgtttgaatgagttga

SEQ ID NO: 866 - RNA, 21 nt, synthetic construct
  source 1..21: mol_type = other RNA
  modified_base 1: mod_base = OTHER; note = 2'-O-methylguanosine-3'- phosphorothioate
  modified_base 2: mod_base = OTHER; note = 2'-O-methylcytidine-3'- phosphorothioate
  modified_base 3: mod_base = OTHER; note = 2'-O-methyladenosine-3'-phosphate
  modified_base 4: mod_base = OTHER; note = 2'-O-methylguanosine-3'-phosphate
  modified_base 5: mod_base = OTHER; note = 2'-O-methylguanosine-3'-phosphate
  modified_base 6: mod_base = OTHER; note = 2'-O-hexadecyl-cytidine-3'-phosphate
  modified_base 7: mod_base = OTHER; note = 2'-O-methylguanosine-3'-phosphate
  modified_base 8: mod_base = OTHER; note = 2'-O-methyluridine-3'-phosphate
  modified_base 9: mod_base = OTHER; note = 2'-fluorouridine-3'-phosphate
  modified_base 10: mod_base = OTHER; note = 2'-fluorouridine-3'-phosphate
  modified_base 11: mod_base = OTHER; note = 2'-fluoroguanosine-3'-phosphate
  modified_base 12: mod_base = OTHER; note = 2'-O-methyladenosine-3'-phosphate
  modified_base 13: mod_base = OTHER; note = 2'-O-methyladenosine-3'-phosphate
  modified_base 14: mod_base = OTHER; note = 2'-O-methyluridine-3'-phosphate
  modified_base 15: mod_base = OTHER; note = 2'-O-methylguanosine-3'-phosphate
  modified_base 16: mod_base = OTHER; note = 2'-O-methyladenosine-3'-phosphate
  modified_base 17: mod_base = OTHER; note = 2'-O-methylguanosine-3'-phosphate
  modified_base 18: mod_base = OTHER; note = 2'-O-methyluridine-3'-phosphate
  modified_base 19: mod_base = OTHER; note = 2'-O-methyluridine-3'-phosphate
  modified_base 20: mod_base = OTHER; note = 2'-O-methylguanosine-3'-phosphate
  modified_base 21: mod_base = OTHER; note = 2'-O-methyladenosine-3'-phosphate N-[tris(GalNAc-alkyl)-amidodecanoyl)]-4-hydroxyprolinol Hyp-(GalNAc-alkyl)3 (2S,4R)-1-[29-[[2-(acetylamino)-2-deoxy-beta-D-galactopyran osyl]oxy]-14,14-bis[[3-[[3-[[5-[[2-(acetylamino)-2-deoxy-be ta-D-galactopyranosyl]oxy]-1-oxopentyl]amino]propyl]amino]- 3-oxopropoxy]methyl]-1,12,19,25-tetraoxo-16-oxa-13,20,24-tr iazanonacos-1-yl]-4-hydroxy-2-hydroxymethylpyrrolidine
gcaggcgtttgaatgagttga

SEQ ID NO: 867 - RNA, 21 nt, synthetic construct
  source 1..21: mol_type = other RNA
  modified_base 1: mod_base = OTHER; note = 2'-O-methylcytidine-3'- phosphorothioate
  modified_base 2: mod_base = OTHER; note = 2'-O-methyladenosine-3'- phosphorothioate
  modified_base 3: mod_base = OTHER; note = 2'-O-methylguanosine-3'-phosphate
  modified_base 4: mod_base = OTHER; note = 2'-O-methylguanosine-3'-phosphate
  modified_base 5: mod_base = OTHER; note = 2'-O-methylcytidine-3'-phosphate
  modified_base 6: mod_base = OTHER; note = 2'-O-hexadecyl-guanosine-3'-phosphate
  modified_base 7: mod_base = OTHER; note = 2'-fluorouridine-3'-phosphate
  modified_base 8: mod_base = OTHER; note = 2'-O-methyluridine-3'-phosphate
  modified_base 9: mod_base = OTHER; note = 2'-fluorouridine-3'-phosphate
  modified_base 10: mod_base = OTHER; note = 2'-fluoroguanosine-3'-phosphate
  modified_base 11: mod_base = OTHER; note = 2'-fluoroadenosine-3'-phosphate
  modified_base 12: mod_base = OTHER; note = 2'-O-methyladenosine-3'-phosphate
  modified_base 13: mod_base = OTHER; note = 2'-O-methyluridine-3'-phosphate
  modified_base 14: mod_base = OTHER; note = 2'-O-methylguanosine-3'-phosphate
  modified_base 15: mod_base = OTHER; note = 2'-O-methyladenosine-3'-phosphate
  modified_base 16: mod_base = OTHER; note = 2'-O-methylguanosine-3'-phosphate
  modified_base 17: mod_base = OTHER; note = 2'-O-methyluridine-3'-phosphate
  modified_base 18: mod_base = OTHER; note = 2'-O-methyluridine-3'-phosphate
  modified_base 19: mod_base = OTHER; note = 2'-O-methylguanosine-3'-phosphate
  modified_base 20: mod_base = OTHER; note = 2'-O-methyluridine-3'-phosphate
  modified_base 21: mod_base = OTHER; note = 2'-O-methyladenosine-3'-phosphate N-[tris(GalNAc-alkyl)-amidodecanoyl)]-4-hydroxyprolinol Hyp-(GalNAc-alkyl)3 (2S,4R)-1-[29-[[2-(acetylamino)-2-deoxy-beta-D-galactopyran osyl]oxy]-14,14-bis[[3-[[3-[[5-[[2-(acetylamino)-2-deoxy-be ta-D-galactopyranosyl]oxy]-1-oxopentyl]amino]propyl]amino]- 3-oxopropoxy]methyl]-1,12,19,25-tetraoxo-16-oxa-13,20,24-tr iazanonacos-1-yl]-4-hydroxy-2-hydroxymethylpyrrolidine
caggcgtttgaatgagttgta

SEQ ID NO: 868 - RNA, 21 nt, synthetic construct
  source 1..21: mol_type = other RNA
  modified_base 1: mod_base = OTHER; note = 2'-O-methylcytidine-3'- phosphorothioate
  modified_base 2: mod_base = OTHER; note = 2'-O-methyladenosine-3'- phosphorothioate
  modified_base 3: mod_base = OTHER; note = 2'-O-methylguanosine-3'-phosphate
  modified_base 4: mod_base = OTHER; note = 2'-O-methylguanosine-3'-phosphate
  modified_base 5: mod_base = OTHER; note = 2'-O-methylcytidine-3'-phosphate
  modified_base 6: mod_base = OTHER; note = 2'-O-hexadecyl-guanosine-3'-phosphate
  modified_base 7: mod_base = OTHER; note = 2'-O-methyluridine-3'-phosphate
  modified_base 8: mod_base = OTHER; note = 2'-O-methyluridine-3'-phosphate
  modified_base 9: mod_base = OTHER; note = 2'-fluorouridine-3'-phosphate
  modified_base 10: mod_base = OTHER; note = 2'-fluoroguanosine-3'-phosphate
  modified_base 11: mod_base = OTHER; note = 2'-fluoroadenosine-3'-phosphate
  modified_base 12: mod_base = OTHER; note = 2'-O-methyladenosine-3'-phosphate
  modified_base 13: mod_base = OTHER; note = 2'-O-methyluridine-3'-phosphate
  modified_base 14: mod_base = OTHER; note = 2'-O-methylguanosine-3'-phosphate
  modified_base 15: mod_base = OTHER; note = 2'-O-methyladenosine-3'-phosphate
  modified_base 16: mod_base = OTHER; note = 2'-O-methylguanosine-3'-phosphate
  modified_base 17: mod_base = OTHER; note = 2'-O-methyluridine-3'-phosphate
  modified_base 18: mod_base = OTHER; note = 2'-O-methyluridine-3'-phosphate
  modified_base 19: mod_base = OTHER; note = 2'-O-methylguanosine-3'-phosphate
  modified_base 20: mod_base = OTHER; note = 2'-O-methyluridine-3'-phosphate
  modified_base 21: mod_base = OTHER; note = 2'-O-methyladenosine-3'-phosphate N-[tris(GalNAc-alkyl)-amidodecanoyl)]-4-hydroxyprolinol Hyp-(GalNAc-alkyl)3 (2S,4R)-1-[29-[[2-(acetylamino)-2-deoxy-beta-D-galactopyran osyl]oxy]-14,14-bis[[3-[[3-[[5-[[2-(acetylamino)-2-deoxy-be ta-D-galactopyranosyl]oxy]-1-oxopentyl]amino]propyl]amino]- 3-oxopropoxy]methyl]-1,12,19,25-tetraoxo-16-oxa-13,20,24-tr iazanonacos-1-yl]-4-hydroxy-2-hydroxymethylpyrrolidine
caggcgtttgaatgagttgta

SEQ ID NO: 869 - RNA, 21 nt, synthetic construct
  source 1..21: mol_type = other RNA
  modified_base 1: mod_base = OTHER; note = 2'-O-methyladenosine-3'- phosphorothioate
  modified_base 2: mod_base = OTHER; note = 2'-O-methylguanosine-3'- phosphorothioate
  modified_base 3: mod_base = OTHER; note = 2'-O-methylguanosine-3'-phosphate
  modified_base 4: mod_base = OTHER; note = 2'-O-methylcytidine-3'-phosphate
  modified_base 5: mod_base = OTHER; note = 2'-O-methylguanosine-3'-phosphate
  modified_base 6: mod_base = OTHER; note = 2'-O-hexadecyl-uridine-3'-phosphate
  modified_base 7: mod_base = OTHER; note = 2'-fluorouridine-3'-phosphate
  modified_base 8: mod_base = OTHER; note = 2'-O-methyluridine-3'-phosphate
  modified_base 9: mod_base = OTHER; note = 2'-fluoroguanosine-3'-phosphate
  modified_base 10: mod_base = OTHER; note = 2'-fluoroadenosine-3'-phosphate
  modified_base 11: mod_base = OTHER; note = 2'-fluoroadenosine-3'-phosphate
  modified_base 12: mod_base = OTHER; note = 2'-O-methyluridine-3'-phosphate
  modified_base 13: mod_base = OTHER; note = 2'-O-methylguanosine-3'-phosphate
  modified_base 14: mod_base = OTHER; note = 2'-O-methyladenosine-3'-phosphate
  modified_base 15: mod_base = OTHER; note = 2'-O-methylguanosine-3'-phosphate
  modified_base 16: mod_base = OTHER; note = 2'-O-methyluridine-3'-phosphate
  modified_base 17: mod_base = OTHER; note = 2'-O-methyluridine-3'-phosphate
  modified_base 18: mod_base = OTHER; note = 2'-O-methylguanosine-3'-phosphate
  modified_base 19: mod_base = OTHER; note = 2'-O-methyluridine-3'-phosphate
  modified_base 20: mod_base = OTHER; note = 2'-O-methylguanosine-3'-phosphate
  modified_base 21: mod_base = OTHER; note = 2'-O-methyladenosine-3'-phosphate N-[tris(GalNAc-alkyl)-amidodecanoyl)]-4-hydroxyprolinol Hyp-(GalNAc-alkyl)3 (2S,4R)-1-[29-[[2-(acetylamino)-2-deoxy-beta-D-galactopyran osyl]oxy]-14,14-bis[[3-[[3-[[5-[[2-(acetylamino)-2-deoxy-be ta-D-galactopyranosyl]oxy]-1-oxopentyl]amino]propyl]amino]- 3-oxopropoxy]methyl]-1,12,19,25-tetraoxo-16-oxa-13,20,24-tr iazanonacos-1-yl]-4-hydroxy-2-hydroxymethylpyrrolidine
aggcgtttgaatgagttgtga

SEQ ID NO: 870 - RNA, 21 nt, synthetic construct
  source 1..21: mol_type = other RNA
  modified_base 1: mod_base = OTHER; note = 2'-O-methyladenosine-3'- phosphorothioate
  modified_base 2: mod_base = OTHER; note = 2'-O-methylguanosine-3'- phosphorothioate
  modified_base 3: mod_base = OTHER; note = 2'-O-methylguanosine-3'-phosphate
  modified_base 4: mod_base = OTHER; note = 2'-O-methylcytidine-3'-phosphate
  modified_base 5: mod_base = OTHER; note = 2'-O-methylguanosine-3'-phosphate
  modified_base 6: mod_base = OTHER; note = 2'-O-hexadecyl-uridine-3'-phosphate
  modified_base 7: mod_base = OTHER; note = 2'-O-methyluridine-3'-phosphate
  modified_base 8: mod_base = OTHER; note = 2'-O-methyluridine-3'-phosphate
  modified_base 9: mod_base = OTHER; note = 2'-fluoroguanosine-3'-phosphate
  modified_base 10: mod_base = OTHER; note = 2'-fluoroadenosine-3'-phosphate
  modified_base 11: mod_base = OTHER; note = 2'-fluoroadenosine-3'-phosphate
  modified_base 12: mod_base = OTHER; note = 2'-O-methyluridine-3'-phosphate
  modified_base 13: mod_base = OTHER; note = 2'-O-methylguanosine-3'-phosphate
  modified_base 14: mod_base = OTHER; note = 2'-O-methyladenosine-3'-phosphate
  modified_base 15: mod_base = OTHER; note = 2'-O-methylguanosine-3'-phosphate
  modified_base 16: mod_base = OTHER; note = 2'-O-methyluridine-3'-phosphate
  modified_base 17: mod_base = OTHER; note = 2'-O-methyluridine-3'-phosphate
  modified_base 18: mod_base = OTHER; note = 2'-O-methylguanosine-3'-phosphate
  modified_base 19: mod_base = OTHER; note = 2'-O-methyluridine-3'-phosphate
  modified_base 20: mod_base = OTHER; note = 2'-O-methylguanosine-3'-phosphate
  modified_base 21: mod_base = OTHER; note = 2'-O-methyladenosine-3'-phosphate N-[tris(GalNAc-alkyl)-amidodecanoyl)]-4-hydroxyprolinol Hyp-(GalNAc-alkyl)3 (2S,4R)-1-[29-[[2-(acetylamino)-2-deoxy-beta-D-galactopyran osyl]oxy]-14,14-bis[[3-[[3-[[5-[[2-(acetylamino)-2-deoxy-be ta-D-galactopyranosyl]oxy]-1-oxopentyl]amino]propyl]amino]- 3-oxopropoxy]methyl]-1,12,19,25-tetraoxo-16-oxa-13,20,24-tr iazanonacos-1-yl]-4-hydroxy-2-hydroxymethylpyrrolidine
aggcgtttgaatgagttgtga

SEQ ID NO: 871 - RNA, 21 nt, synthetic construct
  source 1..21: mol_type = other RNA
  modified_base 1: mod_base = OTHER; note = 2'-O-methylguanosine-3'- phosphorothioate
  modified_base 2: mod_base = OTHER; note = 2'-O-methylcytidine-3'- phosphorothioate
  modified_base 3: mod_base = OTHER; note = 2'-O-methylguanosine-3'-phosphate
  modified_base 4: mod_base = OTHER; note = 2'-O-methyluridine-3'-phosphate
  modified_base 5: mod_base = OTHER; note = 2'-O-methyluridine-3'-phosphate
  modified_base 6: mod_base = OTHER; note = 2'-O-hexadecyl-uridine-3'-phosphate
  modified_base 7: mod_base = OTHER; note = 2'-fluoroguanosine-3'-phosphate
  modified_base 8: mod_base = OTHER; note = 2'-O-methyladenosine-3'-phosphate
  modified_base 9: mod_base = OTHER; note = 2'-fluoroadenosine-3'-phosphate
  modified_base 10: mod_base = OTHER; note = 2'-fluorouridine-3'-phosphate
  modified_base 11: mod_base = OTHER; note = 2'-fluoroguanosine-3'-phosphate
  modified_base 12: mod_base = OTHER; note = 2'-O-methyladenosine-3'-phosphate
  modified_base 13: mod_base = OTHER; note = 2'-O-methylguanosine-3'-phosphate
  modified_base 14: mod_base = OTHER; note = 2'-O-methyluridine-3'-phosphate
  modified_base 15: mod_base = OTHER; note = 2'-O-methyluridine-3'-phosphate
  modified_base 16: mod_base = OTHER; note = 2'-O-methylguanosine-3'-phosphate
  modified_base 17: mod_base = OTHER; note = 2'-O-methyluridine-3'-phosphate
  modified_base 18: mod_base = OTHER; note = 2'-O-methylguanosine-3'-phosphate
  modified_base 19: mod_base = OTHER; note = 2'-O-methylguanosine-3'-phosphate
  modified_base 20: mod_base = OTHER; note = 2'-O-methyluridine-3'-phosphate
  modified_base 21: mod_base = OTHER; note = 2'-O-methyladenosine-3'-phosphate N-[tris(GalNAc-alkyl)-amidodecanoyl)]-4-hydroxyprolinol Hyp-(GalNAc-alkyl)3 (2S,4R)-1-[29-[[2-(acetylamino)-2-deoxy-beta-D-galactopyran osyl]oxy]-14,14-bis[[3-[[3-[[5-[[2-(acetylamino)-2-deoxy-be ta-D-galactopyranosyl]oxy]-1-oxopentyl]amino]propyl]amino]- 3-oxopropoxy]methyl]-1,12,19,25-tetraoxo-16-oxa-13,20,24-tr iazanonacos-1-yl]-4-hydroxy-2-hydroxymethylpyrrolidine
gcgtttgaatgagttgtggta

SEQ ID NO: 872 - RNA, 21 nt, synthetic construct
  source 1..21: mol_type = other RNA
  modified_base 1: mod_base = OTHER; note = 2'-O-methylguanosine-3'- phosphorothioate
  modified_base 2: mod_base = OTHER; note = 2'-O-methylcytidine-3'- phosphorothioate
  modified_base 3: mod_base = OTHER; note = 2'-O-methylguanosine-3'-phosphate
  modified_base 4: mod_base = OTHER; note = 2'-O-methyluridine-3'-phosphate
  modified_base 5: mod_base = OTHER; note = 2'-O-methyluridine-3'-phosphate
  modified_base 6: mod_base = OTHER; note = 2'-O-hexadecyl-uridine-3'-phosphate
  modified_base 7: mod_base = OTHER; note = 2'-O-methylguanosine-3'-phosphate
  modified_base 8: mod_base = OTHER; note = 2'-O-methyladenosine-3'-phosphate
  modified_base 9: mod_base = OTHER; note = 2'-fluoroadenosine-3'-phosphate
  modified_base 10: mod_base = OTHER; note = 2'-fluorouridine-3'-phosphate
  modified_base 11: mod_base = OTHER; note = 2'-fluoroguanosine-3'-phosphate
  modified_base 12: mod_base = OTHER; note = 2'-O-methyladenosine-3'-phosphate
  modified_base 13: mod_base = OTHER; note = 2'-O-methylguanosine-3'-phosphate
  modified_base 14: mod_base = OTHER; note = 2'-O-methyluridine-3'-phosphate
  modified_base 15: mod_base = OTHER; note = 2'-O-methyluridine-3'-phosphate
  modified_base 16: mod_base = OTHER; note = 2'-O-methylguanosine-3'-phosphate
  modified_base 17: mod_base = OTHER; note = 2'-O-methyluridine-3'-phosphate
  modified_base 18: mod_base = OTHER; note = 2'-O-methylguanosine-3'-phosphate
  modified_base 19: mod_base = OTHER; note = 2'-O-methylguanosine-3'-phosphate
  modified_base 20: mod_base = OTHER; note = 2'-O-methyluridine-3'-phosphate
  modified_base 21: mod_base = OTHER; note = 2'-O-methyladenosine-3'-phosphate N-[tris(GalNAc-alkyl)-amidodecanoyl)]-4-hydroxyprolinol Hyp-(GalNAc-alkyl)3 (2S,4R)-1-[29-[[2-(acetylamino)-2-deoxy-beta-D-galactopyran osyl]oxy]-14,14-bis[[3-[[3-[[5-[[2-(acetylamino)-2-deoxy-be ta-D-galactopyranosyl]oxy]-1-oxopentyl]amino]propyl]amino]- 3-oxopropoxy]methyl]-1,12,19,25-tetraoxo-16-oxa-13,20,24-tr iazanonacos-1-yl]-4-hydroxy-2-hydroxymethylpyrrolidine
gcgtttgaatgagttgtggta

SEQ ID NO: 873 - RNA, 21 nt, synthetic construct
  source 1..21: mol_type = other RNA
  modified_base 1: mod_base = OTHER; note = 2'-O-methylguanosine-3'- phosphorothioate
  modified_base 2: mod_base = OTHER; note = 2'-O-methyluridine-3'-phosphorothioate
  modified_base 3: mod_base = OTHER; note = 2'-O-methyluridine-3'-phosphate
  modified_base 4: mod_base = OTHER; note = 2'-O-methyluridine-3'-phosphate
  modified_base 5: mod_base = OTHER; note = 2'-O-methylguanosine-3'-phosphate
  modified_base 6: mod_base = OTHER; note = 2'-O-hexadecyl-adenosine-3'-phosphate
  modified_base 7: mod_base = OTHER; note = 2'-fluoroadenosine-3'-phosphate
  modified_base 8: mod_base = OTHER; note = 2'-O-methyluridine-3'-phosphate
  modified_base 9: mod_base = OTHER; note = 2'-fluoroguanosine-3'-phosphate
  modified_base 10: mod_base = OTHER; note = 2'-fluoroadenosine-3'-phosphate
  modified_base 11: mod_base = OTHER; note = 2'-fluoroguanosine-3'-phosphate
  modified_base 12: mod_base = OTHER; note = 2'-O-methyluridine-3'-phosphate
  modified_base 13: mod_base = OTHER; note = 2'-O-methyluridine-3'-phosphate
  modified_base 14: mod_base = OTHER; note = 2'-O-methylguanosine-3'-phosphate
  modified_base 15: mod_base = OTHER; note = 2'-O-methyluridine-3'-phosphate
  modified_base 16: mod_base = OTHER; note = 2'-O-methylguanosine-3'-phosphate
  modified_base 17: mod_base = OTHER; note = 2'-O-methylguanosine-3'-phosphate
  modified_base 18: mod_base = OTHER; note = 2'-O-methyluridine-3'-phosphate
  modified_base 19: mod_base = OTHER; note = 2'-O-methyluridine-3'-phosphate
  modified_base 20: mod_base = OTHER; note = 2'-O-methylguanosine-3'-phosphate
  modified_base 21: mod_base = OTHER; note = 2'-O-methyladenosine-3'-phosphate N-[tris(GalNAc-alkyl)-amidodecanoyl)]-4-hydroxyprolinol Hyp-(GalNAc-alkyl)3 (2S,4R)-1-[29-[[2-(acetylamino)-2-deoxy-beta-D-galactopyran osyl]oxy]-14,14-bis[[3-[[3-[[5-[[2-(acetylamino)-2-deoxy-be ta-D-galactopyranosyl]oxy]-1-oxopentyl]amino]propyl]amino]- 3-oxopropoxy]methyl]-1,12,19,25-tetraoxo-16-oxa-13,20,24-tr iazanonacos-1-yl]-4-hydroxy-2-hydroxymethylpyrrolidine
gtttgaatgagttgtggttga

SEQ ID NO: 874 - RNA, 21 nt, synthetic construct
  source 1..21: mol_type = other RNA
  modified_base 1: mod_base = OTHER; note = 2'-O-methylguanosine-3'- phosphorothioate
  modified_base 2: mod_base = OTHER; note = 2'-O-methyluridine-3'-phosphorothioate
  modified_base 3: mod_base = OTHER; note = 2'-O-methyluridine-3'-phosphate
  modified_base 4: mod_base = OTHER; note = 2'-O-methyluridine-3'-phosphate
  modified_base 5: mod_base = OTHER; note = 2'-O-methylguanosine-3'-phosphate
  modified_base 6: mod_base = OTHER; note = 2'-O-hexadecyl-adenosine-3'-phosphate
  modified_base 7: mod_base = OTHER; note = 2'-O-methyladenosine-3'-phosphate
  modified_base 8: mod_base = OTHER; note = 2'-O-methyluridine-3'-phosphate
  modified_base 9: mod_base = OTHER; note = 2'-fluoroguanosine-3'-phosphate
  modified_base 10: mod_base = OTHER; note = 2'-fluoroadenosine-3'-phosphate
  modified_base 11: mod_base = OTHER; note = 2'-fluoroguanosine-3'-phosphate
  modified_base 12: mod_base = OTHER; note = 2'-O-methyluridine-3'-phosphate
  modified_base 13: mod_base = OTHER; note = 2'-O-methyluridine-3'-phosphate
  modified_base 14: mod_base = OTHER; note = 2'-O-methylguanosine-3'-phosphate
  modified_base 15: mod_base = OTHER; note = 2'-O-methyluridine-3'-phosphate
  modified_base 16: mod_base = OTHER; note = 2'-O-methylguanosine-3'-phosphate
  modified_base 17: mod_base = OTHER; note = 2'-O-methylguanosine-3'-phosphate
  modified_base 18: mod_base = OTHER; note = 2'-O-methyluridine-3'-phosphate
  modified_base 19: mod_base = OTHER; note = 2'-O-methyluridine-3'-phosphate
  modified_base 20: mod_base = OTHER; note = 2'-O-methylguanosine-3'-phosphate
  modified_base 21: mod_base = OTHER; note = 2'-O-methyladenosine-3'-phosphate N-[tris(GalNAc-alkyl)-amidodecanoyl)]-4-hydroxyprolinol Hyp-(GalNAc-alkyl)3 (2S,4R)-1-[29-[[2-(acetylamino)-2-deoxy-beta-D-galactopyran osyl]oxy]-14,14-bis[[3-[[3-[[5-[[2-(acetylamino)-2-deoxy-be ta-D-galactopyranosyl]oxy]-1-oxopentyl]amino]propyl]amino]- 3-oxopropoxy]methyl]-1,12,19,25-tetraoxo-16-oxa-13,20,24-tr iazanonacos-1-yl]-4-hydroxy-2-hydroxymethylpyrrolidine
gtttgaatgagttgtggttga

SEQ ID NO: 875 - RNA, 21 nt, synthetic construct
  source 1..21: mol_type = other RNA
  modified_base 1: mod_base = OTHER; note = 2'-O-methyluridine-3'-phosphorothioate
  modified_base 2: mod_base = OTHER; note = 2'-O-methyluridine-3'-phosphorothioate
  modified_base 3: mod_base = OTHER; note = 2'-O-methyluridine-3'-phosphate
  modified_base 4: mod_base = OTHER; note = 2'-O-methylguanosine-3'-phosphate
  modified_base 5: mod_base = OTHER; note = 2'-O-methyladenosine-3'-phosphate
  modified_base 6: mod_base = OTHER; note = 2'-O-hexadecyl-adenosine-3'-phosphate
  modified_base 7: mod_base = OTHER; note = 2'-fluorouridine-3'-phosphate
  modified_base 8: mod_base = OTHER; note = 2'-O-methylguanosine-3'-phosphate
  modified_base 9: mod_base = OTHER; note = 2'-fluoroadenosine-3'-phosphate
  modified_base 10: mod_base = OTHER; note = 2'-fluoroguanosine-3'-phosphate
  modified_base 11: mod_base = OTHER; note = 2'-fluorouridine-3'-phosphate
  modified_base 12: mod_base = OTHER; note = 2'-O-methyluridine-3'-phosphate
  modified_base 13: mod_base = OTHER; note = 2'-O-methylguanosine-3'-phosphate
  modified_base 14: mod_base = OTHER; note = 2'-O-methyluridine-3'-phosphate
  modified_base 15: mod_base = OTHER; note = 2'-O-methylguanosine-3'-phosphate
  modified_base 16: mod_base = OTHER; note = 2'-O-methylguanosine-3'-phosphate
  modified_base 17: mod_base = OTHER; note = 2'-O-methyluridine-3'-phosphate
  modified_base 18: mod_base = OTHER; note = 2'-O-methyluridine-3'-phosphate
  modified_base 19: mod_base = OTHER; note = 2'-O-methylguanosine-3'-phosphate
  modified_base 20: mod_base = OTHER; note = 2'-O-methylcytidine-3'-phosphate
  modified_base 21: mod_base = OTHER; note = 2'-O-methyladenosine-3'-phosphate N-[tris(GalNAc-alkyl)-amidodecanoyl)]-4-hydroxyprolinol Hyp-(GalNAc-alkyl)3 (2S,4R)-1-[29-[[2-(acetylamino)-2-deoxy-beta-D-galactopyran osyl]oxy]-14,14-bis[[3-[[3-[[5-[[2-(acetylamino)-2-deoxy-be ta-D-galactopyranosyl]oxy]-1-oxopentyl]amino]propyl]amino]- 3-oxopropoxy]methyl]-1,12,19,25-tetraoxo-16-oxa-13,20,24-tr iazanonacos-1-yl]-4-hydroxy-2-hydroxymethylpyrrolidine
tttgaatgagttgtggttgca

SEQ ID NO: 876 - RNA, 21 nt, synthetic construct
  source 1..21: mol_type = other RNA
  modified_base 1: mod_base = OTHER; note = 2'-O-methyluridine-3'-phosphorothioate
  modified_base 2: mod_base = OTHER; note = 2'-O-methyluridine-3'-phosphorothioate
  modified_base 3: mod_base = OTHER; note = 2'-O-methyluridine-3'-phosphate
  modified_base 4: mod_base = OTHER; note = 2'-O-methylguanosine-3'-phosphate
  modified_base 5: mod_base = OTHER; note = 2'-O-methyladenosine-3'-phosphate
  modified_base 6: mod_base = OTHER; note = 2'-O-hexadecyl-adenosine-3'-phosphate
  modified_base 7: mod_base = OTHER; note = 2'-O-methyluridine-3'-phosphate
  modified_base 8: mod_base = OTHER; note = 2'-O-methylguanosine-3'-phosphate
  modified_base 9: mod_base = OTHER; note = 2'-fluoroadenosine-3'-phosphate
  modified_base 10: mod_base = OTHER; note = 2'-fluoroguanosine-3'-phosphate
  modified_base 11: mod_base = OTHER; note = 2'-fluorouridine-3'-phosphate
  modified_base 12: mod_base = OTHER; note = 2'-O-methyluridine-3'-phosphate
  modified_base 13: mod_base = OTHER; note = 2'-O-methylguanosine-3'-phosphate
  modified_base 14: mod_base = OTHER; note = 2'-O-methyluridine-3'-phosphate
  modified_base 15: mod_base = OTHER; note = 2'-O-methylguanosine-3'-phosphate
  modified_base 16: mod_base = OTHER; note = 2'-O-methylguanosine-3'-phosphate
  modified_base 17: mod_base = OTHER; note = 2'-O-methyluridine-3'-phosphate
  modified_base 18: mod_base = OTHER; note = 2'-O-methyluridine-3'-phosphate
  modified_base 19: mod_base = OTHER; note = 2'-O-methylguanosine-3'-phosphate
  modified_base 20: mod_base = OTHER; note = 2'-O-methylcytidine-3'-phosphate
  modified_base 21: mod_base = OTHER; note = 2'-O-methyladenosine-3'-phosphate N-[tris(GalNAc-alkyl)-amidodecanoyl)]-4-hydroxyprolinol Hyp-(GalNAc-alkyl)3 (2S,4R)-1-[29-[[2-(acetylamino)-2-deoxy-beta-D-galactopyran osyl]oxy]-14,14-bis[[3-[[3-[[5-[[2-(acetylamino)-2-deoxy-be ta-D-galactopyranosyl]oxy]-1-oxopentyl]amino]propyl]amino]- 3-oxopropoxy]methyl]-1,12,19,25-tetraoxo-16-oxa-13,20,24-tr iazanonacos-1-yl]-4-hydroxy-2-hydroxymethylpyrrolidine
tttgaatgagttgtggttgca

SEQ ID NO: 877 - RNA, 21 nt, synthetic construct
  source 1..21: mol_type = other RNA
  modified_base 1: mod_base = OTHER; note = 2'-O-methyluridine-3'-phosphorothioate
  modified_base 2: mod_base = OTHER; note = 2'-O-methyluridine-3'-phosphorothioate
  modified_base 3: mod_base = OTHER; note = 2'-O-methylguanosine-3'-phosphate
  modified_base 4: mod_base = OTHER; note = 2'-O-methyladenosine-3'-phosphate
  modified_base 5: mod_base = OTHER; note = 2'-O-methyladenosine-3'-phosphate
  modified_base 6: mod_base = OTHER; note = 2'-O-hexadecyl-uridine-3'-phosphate
  modified_base 7: mod_base = OTHER; note = 2'-fluoroguanosine-3'-phosphate
  modified_base 8: mod_base = OTHER; note = 2'-O-methyladenosine-3'-phosphate
  modified_base 9: mod_base = OTHER; note = 2'-fluoroguanosine-3'-phosphate
  modified_base 10: mod_base = OTHER; note = 2'-fluorouridine-3'-phosphate
  modified_base 11: mod_base = OTHER; note = 2'-fluorouridine-3'-phosphate
  modified_base 12: mod_base = OTHER; note = 2'-O-methylguanosine-3'-phosphate
  modified_base 13: mod_base = OTHER; note = 2'-O-methyluridine-3'-phosphate
  modified_base 14: mod_base = OTHER; note = 2'-O-methylguanosine-3'-phosphate
  modified_base 15: mod_base = OTHER; note = 2'-O-methylguanosine-3'-phosphate
  modified_base 16: mod_base = OTHER; note = 2'-O-methyluridine-3'-phosphate
  modified_base 17: mod_base = OTHER; note = 2'-O-methyluridine-3'-phosphate
  modified_base 18: mod_base = OTHER; note = 2'-O-methylguanosine-3'-phosphate
  modified_base 19: mod_base = OTHER; note = 2'-O-methylcytidine-3'-phosphate
  modified_base 20: mod_base = OTHER; note = 2'-O-methylcytidine-3'-phosphate
  modified_base 21: mod_base = OTHER; note = 2'-O-methyladenosine-3'-phosphate N-[tris(GalNAc-alkyl)-amidodecanoyl)]-4-hydroxyprolinol Hyp-(GalNAc-alkyl)3 (2S,4R)-1-[29-[[2-(acetylamino)-2-deoxy-beta-D-galactopyran osyl]oxy]-14,14-bis[[3-[[3-[[5-[[2-(acetylamino)-2-deoxy-be ta-D-galactopyranosyl]oxy]-1-oxopentyl]amino]propyl]amino]- 3-oxopropoxy]methyl]-1,12,19,25-tetraoxo-16-oxa-13,20,24-tr iazanonacos-1-yl]-4-hydroxy-2-hydroxymethylpyrrolidine
ttgaatgagttgtggttgcca

SEQ ID NO: 878 - RNA, 21 nt, synthetic construct
  source 1..21: mol_type = other RNA
  modified_base 1: mod_base = OTHER; note = 2'-O-methyluridine-3'-phosphorothioate
  modified_base 2: mod_base = OTHER; note = 2'-O-methyluridine-3'-phosphorothioate
  modified_base 3: mod_base = OTHER; note = 2'-O-methylguanosine-3'-phosphate
  modified_base 4: mod_base = OTHER; note = 2'-O-methyladenosine-3'-phosphate
  modified_base 5: mod_base = OTHER; note = 2'-O-methyladenosine-3'-phosphate
  modified_base 6: mod_base = OTHER; note = 2'-O-hexadecyl-uridine-3'-phosphate
  modified_base 7: mod_base = OTHER; note = 2'-O-methylguanosine-3'-phosphate
  modified_base 8: mod_base = OTHER; note = 2'-O-methyladenosine-3'-phosphate
  modified_base 9: mod_base = OTHER; note = 2'-fluoroguanosine-3'-phosphate
  modified_base 10: mod_base = OTHER; note = 2'-fluorouridine-3'-phosphate
  modified_base 11: mod_base = OTHER; note = 2'-fluorouridine-3'-phosphate
  modified_base 12: mod_base = OTHER; note = 2'-O-methylguanosine-3'-phosphate
  modified_base 13: mod_base = OTHER; note = 2'-O-methyluridine-3'-phosphate
  modified_base 14: mod_base = OTHER; note = 2'-O-methylguanosine-3'-phosphate
  modified_base 15: mod_base = OTHER; note = 2'-O-methylguanosine-3'-phosphate
  modified_base 16: mod_base = OTHER; note = 2'-O-methyluridine-3'-phosphate
  modified_base 17: mod_base = OTHER; note = 2'-O-methyluridine-3'-phosphate
  modified_base 18: mod_base = OTHER; note = 2'-O-methylguanosine-3'-phosphate
  modified_base 19: mod_base = OTHER; note = 2'-O-methylcytidine-3'-phosphate
  modified_base 20: mod_base = OTHER; note = 2'-O-methylcytidine-3'-phosphate
  modified_base 21: mod_base = OTHER; note = 2'-O-methyladenosine-3'-phosphate N-[tris(GalNAc-alkyl)-amidodecanoyl)]-4-hydroxyprolinol Hyp-(GalNAc-alkyl)3 (2S,4R)-1-[29-[[2-(acetylamino)-2-deoxy-beta-D-galactopyran osyl]oxy]-14,14-bis[[3-[[3-[[5-[[2-(acetylamino)-2-deoxy-be ta-D-galactopyranosyl]oxy]-1-oxopentyl]amino]propyl]amino]- 3-oxopropoxy]methyl]-1,12,19,25-tetraoxo-16-oxa-13,20,24-tr iazanonacos-1-yl]-4-hydroxy-2-hydroxymethylpyrrolidine
ttgaatgagttgtggttgcca

SEQ ID NO: 879 - RNA, 21 nt, synthetic construct
  source 1..21: mol_type = other RNA
  modified_base 1: mod_base = OTHER; note = 2'-O-methyluridine-3'-phosphorothioate
  modified_base 2: mod_base = OTHER; note = 2'-O-methylguanosine-3'- phosphorothioate
  modified_base 3: mod_base = OTHER; note = 2'-O-methyladenosine-3'-phosphate
  modified_base 4: mod_base = OTHER; note = 2'-O-methyladenosine-3'-phosphate
  modified_base 5: mod_base = OTHER; note = 2'-O-methyluridine-3'-phosphate
  modified_base 6: mod_base = OTHER; note = 2'-O-hexadecyl-guanosine-3'-phosphate
  modified_base 7: mod_base = OTHER; note = 2'-fluoroadenosine-3'-phosphate
  modified_base 8: mod_base = OTHER; note = 2'-O-methylguanosine-3'-phosphate
  modified_base 9: mod_base = OTHER; note = 2'-fluorouridine-3'-phosphate
  modified_base 10: mod_base = OTHER; note = 2'-fluorouridine-3'-phosphate
  modified_base 11: mod_base = OTHER; note = 2'-fluoroguanosine-3'-phosphate
  modified_base 12: mod_base = OTHER; note = 2'-O-methyluridine-3'-phosphate
  modified_base 13: mod_base = OTHER; note = 2'-O-methylguanosine-3'-phosphate
  modified_base 14: mod_base = OTHER; note = 2'-O-methylguanosine-3'-phosphate
  modified_base 15: mod_base = OTHER; note = 2'-O-methyluridine-3'-phosphate
  modified_base 16: mod_base = OTHER; note = 2'-O-methyluridine-3'-phosphate
  modified_base 17: mod_base = OTHER; note = 2'-O-methylguanosine-3'-phosphate
  modified_base 18: mod_base = OTHER; note = 2'-O-methylcytidine-3'-phosphate
  modified_base 19: mod_base = OTHER; note = 2'-O-methylcytidine-3'-phosphate
  modified_base 20: mod_base = OTHER; note = 2'-O-methyladenosine-3'-phosphate
  modified_base 21: mod_base = OTHER; note = 2'-O-methyladenosine-3'-phosphate N-[tris(GalNAc-alkyl)-amidodecanoyl)]-4-hydroxyprolinol Hyp-(GalNAc-alkyl)3 (2S,4R)-1-[29-[[2-(acetylamino)-2-deoxy-beta-D-galactopyran osyl]oxy]-14,14-bis[[3-[[3-[[5-[[2-(acetylamino)-2-deoxy-be ta-D-galactopyranosyl]oxy]-1-oxopentyl]amino]propyl]amino]- 3-oxopropoxy]methyl]-1,12,19,25-tetraoxo-16-oxa-13,20,24-tr iazanonacos-1-yl]-4-hydroxy-2-hydroxymethylpyrrolidine
tgaatgagttgtggttgccaa

SEQ ID NO: 880 - RNA, 21 nt, synthetic construct
  source 1..21: mol_type = other RNA
  modified_base 1: mod_base = OTHER; note = 2'-O-methylguanosine-3'- phosphorothioate
  modified_base 2: mod_base = OTHER; note = 2'-O-methyladenosine-3'- phosphorothioate
  modified_base 3: mod_base = OTHER; note = 2'-O-methylguanosine-3'-phosphate
  modified_base 4: mod_base = OTHER; note = 2'-O-methyluridine-3'-phosphate
  modified_base 5: mod_base = OTHER; note = 2'-O-methyluridine-3'-phosphate
  modified_base 6: mod_base = OTHER; note = 2'-O-hexadecyl-guanosine-3'-phosphate
  modified_base 7: mod_base = OTHER; note = 2'-fluorouridine-3'-phosphate
  modified_base 8: mod_base = OTHER; note = 2'-O-methylguanosine-3'-phosphate
  modified_base 9: mod_base = OTHER; note = 2'-fluoroguanosine-3'-phosphate
  modified_base 10: mod_base = OTHER; note = 2'-fluorouridine-3'-phosphate
  modified_base 11: mod_base = OTHER; note = 2'-fluorouridine-3'-phosphate
  modified_base 12: mod_base = OTHER; note = 2'-O-methylguanosine-3'-phosphate
  modified_base 13: mod_base = OTHER; note = 2'-O-methylcytidine-3'-phosphate
  modified_base 14: mod_base = OTHER; note = 2'-O-methylcytidine-3'-phosphate
  modified_base 15: mod_base = OTHER; note = 2'-O-methyladenosine-3'-phosphate
  modified_base 16: mod_base = OTHER; note = 2'-O-methyladenosine-3'-phosphate
  modified_base 17: mod_base = OTHER; note = 2'-O-methylguanosine-3'-phosphate
  modified_base 18: mod_base = OTHER; note = 2'-O-methyluridine-3'-phosphate
  modified_base 19: mod_base = OTHER; note = 2'-O-methyladenosine-3'-phosphate
  modified_base 20: mod_base = OTHER; note = 2'-O-methyladenosine-3'-phosphate
  modified_base 21: mod_base = OTHER; note = 2'-O-methyladenosine-3'-phosphate N-[tris(GalNAc-alkyl)-amidodecanoyl)]-4-hydroxyprolinol Hyp-(GalNAc-alkyl)3 (2S,4R)-1-[29-[[2-(acetylamino)-2-deoxy-beta-D-galactopyran osyl]oxy]-14,14-bis[[3-[[3-[[5-[[2-(acetylamino)-2-deoxy-be ta-D-galactopyranosyl]oxy]-1-oxopentyl]amino]propyl]amino]- 3-oxopropoxy]methyl]-1,12,19,25-tetraoxo-16-oxa-13,20,24-tr iazanonacos-1-yl]-4-hydroxy-2-hydroxymethylpyrrolidine
gagttgtggttgccaagtaaa

SEQ ID NO: 881 - RNA, 21 nt, synthetic construct
  source 1..21: mol_type = other RNA
  modified_base 1: mod_base = OTHER; note = 2'-O-methyladenosine-3'- phosphorothioate
  modified_base 2: mod_base = OTHER; note = 2'-O-methylguanosine-3'- phosphorothioate
  modified_base 3: mod_base = OTHER; note = 2'-O-methyluridine-3'-phosphate
  modified_base 4: mod_base = OTHER; note = 2'-O-methyluridine-3'-phosphate
  modified_base 5: mod_base = OTHER; note = 2'-O-methylguanosine-3'-phosphate
  modified_base 6: mod_base = OTHER; note = 2'-O-hexadecyl-uridine-3'-phosphate
  modified_base 7: mod_base = OTHER; note = 2'-fluoroguanosine-3'-phosphate
  modified_base 8: mod_base = OTHER; note = 2'-O-methylguanosine-3'-phosphate
  modified_base 9: mod_base = OTHER; note = 2'-fluorouridine-3'-phosphate
  modified_base 10: mod_base = OTHER; note = 2'-fluorouridine-3'-phosphate
  modified_base 11: mod_base = OTHER; note = 2'-fluoroguanosine-3'-phosphate
  modified_base 12: mod_base = OTHER; note = 2'-O-methylcytidine-3'-phosphate
  modified_base 13: mod_base = OTHER; note = 2'-O-methylcytidine-3'-phosphate
  modified_base 14: mod_base = OTHER; note = 2'-O-methyladenosine-3'-phosphate
  modified_base 15: mod_base = OTHER; note = 2'-O-methyladenosine-3'-phosphate
  modified_base 16: mod_base = OTHER; note = 2'-O-methylguanosine-3'-phosphate
  modified_base 17: mod_base = OTHER; note = 2'-O-methyluridine-3'-phosphate
  modified_base 18: mod_base = OTHER; note = 2'-O-methyladenosine-3'-phosphate
  modified_base 19: mod_base = OTHER; note = 2'-O-methyladenosine-3'-phosphate
  modified_base 20: mod_base = OTHER; note = 2'-O-methyladenosine-3'-phosphate
  modified_base 21: mod_base = OTHER; note = 2'-O-methyladenosine-3'-phosphate N-[tris(GalNAc-alkyl)-amidodecanoyl)]-4-hydroxyprolinol Hyp-(GalNAc-alkyl)3 (2S,4R)-1-[29-[[2-(acetylamino)-2-deoxy-beta-D-galactopyran osyl]oxy]-14,14-bis[[3-[[3-[[5-[[2-(acetylamino)-2-deoxy-be ta-D-galactopyranosyl]oxy]-1-oxopentyl]amino]propyl]amino]- 3-oxopropoxy]methyl]-1,12,19,25-tetraoxo-16-oxa-13,20,24-tr iazanonacos-1-yl]-4-hydroxy-2-hydroxymethylpyrrolidine
agttgtggttgccaagtaaaa

SEQ ID NO: 882 - RNA, 21 nt, synthetic construct
  source 1..21: mol_type = other RNA
  modified_base 1: mod_base = OTHER; note = 2'-O-methylguanosine-3'- phosphorothioate
  modified_base 2: mod_base = OTHER; note = 2'-O-methyluridine-3'-phosphorothioate
  modified_base 3: mod_base = OTHER; note = 2'-O-methyluridine-3'-phosphate
  modified_base 4: mod_base = OTHER; note = 2'-O-methylguanosine-3'-phosphate
  modified_base 5: mod_base = OTHER; note = 2'-O-methyluridine-3'-phosphate
  modified_base 6: mod_base = OTHER; note = 2'-O-hexadecyl-guanosine-3'-phosphate
  modified_base 7: mod_base = OTHER; note = 2'-fluoroguanosine-3'-phosphate
  modified_base 8: mod_base = OTHER; note = 2'-O-methyluridine-3'-phosphate
  modified_base 9: mod_base = OTHER; note = 2'-fluorouridine-3'-phosphate
  modified_base 10: mod_base = OTHER; note = 2'-fluoroguanosine-3'-phosphate
  modified_base 11: mod_base = OTHER; note = 2'-fluorocytidine-3'-phosphate
  modified_base 12: mod_base = OTHER; note = 2'-O-methylcytidine-3'-phosphate
  modified_base 13: mod_base = OTHER; note = 2'-O-methyladenosine-3'-phosphate
  modified_base 14: mod_base = OTHER; note = 2'-O-methyladenosine-3'-phosphate
  modified_base 15: mod_base = OTHER; note = 2'-O-methylguanosine-3'-phosphate
  modified_base 16: mod_base = OTHER; note = 2'-O-methyluridine-3'-phosphate
  modified_base 17: mod_base = OTHER; note = 2'-O-methyladenosine-3'-phosphate
  modified_base 18: mod_base = OTHER; note = 2'-O-methyladenosine-3'-phosphate
  modified_base 19: mod_base = OTHER; note = 2'-O-methyladenosine-3'-phosphate
  modified_base 20: mod_base = OTHER; note = 2'-O-methylguanosine-3'-phosphate
  modified_base 21: mod_base = OTHER; note = 2'-O-methyladenosine-3'-phosphate N-[tris(GalNAc-alkyl)-amidodecanoyl)]-4-hydroxyprolinol Hyp-(GalNAc-alkyl)3 (2S,4R)-1-[29-[[2-(acetylamino)-2-deoxy-beta-D-galactopyran osyl]oxy]-14,14-bis[[3-[[3-[[5-[[2-(acetylamino)-2-deoxy-be ta-D-galactopyranosyl]oxy]-1-oxopentyl]amino]propyl]amino]- 3-oxopropoxy]methyl]-1,12,19,25-tetraoxo-16-oxa-13,20,24-tr iazanonacos-1-yl]-4-hydroxy-2-hydroxymethylpyrrolidine
gttgtggttgccaagtaaaga

SEQ ID NO: 883 - RNA, 21 nt, synthetic construct
  source 1..21: mol_type = other RNA
  modified_base 1: mod_base = OTHER; note = 2'-O-methylguanosine-3'- phosphorothioate
  modified_base 2: mod_base = OTHER; note = 2'-O-methyluridine-3'-phosphorothioate
  modified_base 3: mod_base = OTHER; note = 2'-O-methyluridine-3'-phosphate
  modified_base 4: mod_base = OTHER; note = 2'-O-methylguanosine-3'-phosphate
  modified_base 5: mod_base = OTHER; note = 2'-O-methyluridine-3'-phosphate
  modified_base 6: mod_base = OTHER; note = 2'-O-hexadecyl-guanosine-3'-phosphate
  modified_base 7: mod_base = OTHER; note = 2'-O-methylguanosine-3'-phosphate
  modified_base 8: mod_base = OTHER; note = 2'-O-methyluridine-3'-phosphate
  modified_base 9: mod_base = OTHER; note = 2'-fluorouridine-3'-phosphate
  modified_base 10: mod_base = OTHER; note = 2'-fluoroguanosine-3'-phosphate
  modified_base 11: mod_base = OTHER; note = 2'-fluorocytidine-3'-phosphate
  modified_base 12: mod_base = OTHER; note = 2'-O-methylcytidine-3'-phosphate
  modified_base 13: mod_base = OTHER; note = 2'-O-methyladenosine-3'-phosphate
  modified_base 14: mod_base = OTHER; note = 2'-O-methyladenosine-3'-phosphate
  modified_base 15: mod_base = OTHER; note = 2'-O-methylguanosine-3'-phosphate
  modified_base 16: mod_base = OTHER; note = 2'-O-methyluridine-3'-phosphate
  modified_base 17: mod_base = OTHER; note = 2'-O-methyladenosine-3'-phosphate
  modified_base 18: mod_base = OTHER; note = 2'-O-methyladenosine-3'-phosphate
  modified_base 19: mod_base = OTHER; note = 2'-O-methyladenosine-3'-phosphate
  modified_base 20: mod_base = OTHER; note = 2'-O-methylguanosine-3'-phosphate
  modified_base 21: mod_base = OTHER; note = 2'-O-methyladenosine-3'-phosphate N-[tris(GalNAc-alkyl)-amidodecanoyl)]-4-hydroxyprolinol Hyp-(GalNAc-alkyl)3 (2S,4R)-1-[29-[[2-(acetylamino)-2-deoxy-beta-D-galactopyran osyl]oxy]-14,14-bis[[3-[[3-[[5-[[2-(acetylamino)-2-deoxy-be ta-D-galactopyranosyl]oxy]-1-oxopentyl]amino]propyl]amino]- 3-oxopropoxy]methyl]-1,12,19,25-tetraoxo-16-oxa-13,20,24-tr iazanonacos-1-yl]-4-hydroxy-2-hydroxymethylpyrrolidine
gttgtggttgccaagtaaaga

SEQ ID NO: 884 - RNA, 21 nt, synthetic construct
  source 1..21: mol_type = other RNA
  modified_base 1: mod_base = OTHER; note = 2'-O-methyluridine-3'-phosphorothioate
  modified_base 2: mod_base = OTHER; note = 2'-O-methyluridine-3'-phosphorothioate
  modified_base 3: mod_base = OTHER; note = 2'-O-methylguanosine-3'-phosphate
  modified_base 4: mod_base = OTHER; note = 2'-O-methyluridine-3'-phosphate
  modified_base 5: mod_base = OTHER; note = 2'-O-methylguanosine-3'-phosphate
  modified_base 6: mod_base = OTHER; note = 2'-O-hexadecyl-guanosine-3'-phosphate
  modified_base 7: mod_base = OTHER; note = 2'-fluorouridine-3'-phosphate
  modified_base 8: mod_base = OTHER; note = 2'-O-methyluridine-3'-phosphate
  modified_base 9: mod_base = OTHER; note = 2'-fluoroguanosine-3'-phosphate
  modified_base 10: mod_base = OTHER; note = 2'-fluorocytidine-3'-phosphate
  modified_base 11: mod_base = OTHER; note = 2'-fluorocytidine-3'-phosphate
  modified_base 12: mod_base = OTHER; note = 2'-O-methyladenosine-3'-phosphate
  modified_base 13: mod_base = OTHER; note = 2'-O-methyladenosine-3'-phosphate
  modified_base 14: mod_base = OTHER; note = 2'-O-methylguanosine-3'-phosphate
  modified_base 15: mod_base = OTHER; note = 2'-O-methyluridine-3'-phosphate
  modified_base 16: mod_base = OTHER; note = 2'-O-methyladenosine-3'-phosphate
  modified_base 17: mod_base = OTHER; note = 2'-O-methyladenosine-3'-phosphate
  modified_base 18: mod_base = OTHER; note = 2'-O-methyladenosine-3'-phosphate
  modified_base 19: mod_base = OTHER; note = 2'-O-methylguanosine-3'-phosphate
  modified_base 20: mod_base = OTHER; note = 2'-O-methyluridine-3'-phosphate
  modified_base 21: mod_base = OTHER; note = 2'-O-methyladenosine-3'-phosphate N-[tris(GalNAc-alkyl)-amidodecanoyl)]-4-hydroxyprolinol Hyp-(GalNAc-alkyl)3 (2S,4R)-1-[29-[[2-(acetylamino)-2-deoxy-beta-D-galactopyran osyl]oxy]-14,14-bis[[3-[[3-[[5-[[2-(acetylamino)-2-deoxy-be ta-D-galactopyranosyl]oxy]-1-oxopentyl]amino]propyl]amino]- 3-oxopropoxy]methyl]-1,12,19,25-tetraoxo-16-oxa-13,20,24-tr iazanonacos-1-yl]-4-hydroxy-2-hydroxymethylpyrrolidine
ttgtggttgccaagtaaagta

SEQ ID NO: 885 - RNA, 21 nt, synthetic construct
  source 1..21: mol_type = other RNA
  modified_base 1: mod_base = OTHER; note = 2'-O-methyluridine-3'-phosphorothioate
  modified_base 2: mod_base = OTHER; note = 2'-O-methyluridine-3'-phosphorothioate
  modified_base 3: mod_base = OTHER; note = 2'-O-methylguanosine-3'-phosphate
  modified_base 4: mod_base = OTHER; note = 2'-O-methyluridine-3'-phosphate
  modified_base 5: mod_base = OTHER; note = 2'-O-methylguanosine-3'-phosphate
  modified_base 6: mod_base = OTHER; note = 2'-O-hexadecyl-guanosine-3'-phosphate
  modified_base 7: mod_base = OTHER; note = 2'-O-methyluridine-3'-phosphate
  modified_base 8: mod_base = OTHER; note = 2'-O-methyluridine-3'-phosphate
  modified_base 9: mod_base = OTHER; note = 2'-fluoroguanosine-3'-phosphate
  modified_base 10: mod_base = OTHER; note = 2'-fluorocytidine-3'-phosphate
  modified_base 11: mod_base = OTHER; note = 2'-fluorocytidine-3'-phosphate
  modified_base 12: mod_base = OTHER; note = 2'-O-methyladenosine-3'-phosphate
  modified_base 13: mod_base = OTHER; note = 2'-O-methyladenosine-3'-phosphate
  modified_base 14: mod_base = OTHER; note = 2'-O-methylguanosine-3'-phosphate
  modified_base 15: mod_base = OTHER; note = 2'-O-methyluridine-3'-phosphate
  modified_base 16: mod_base = OTHER; note = 2'-O-methyladenosine-3'-phosphate
  modified_base 17: mod_base = OTHER; note = 2'-O-methyladenosine-3'-phosphate
  modified_base 18: mod_base = OTHER; note = 2'-O-methyladenosine-3'-phosphate
  modified_base 19: mod_base = OTHER; note = 2'-O-methylguanosine-3'-phosphate
  modified_base 20: mod_base = OTHER; note = 2'-O-methyluridine-3'-phosphate
  modified_base 21: mod_base = OTHER; note = 2'-O-methyladenosine-3'-phosphate N-[tris(GalNAc-alkyl)-amidodecanoyl)]-4-hydroxyprolinol Hyp-(GalNAc-alkyl)3 (2S,4R)-1-[29-[[2-(acetylamino)-2-deoxy-beta-D-galactopyran osyl]oxy]-14,14-bis[[3-[[3-[[5-[[2-(acetylamino)-2-deoxy-be ta-D-galactopyranosyl]oxy]-1-oxopentyl]amino]propyl]amino]- 3-oxopropoxy]methyl]-1,12,19,25-tetraoxo-16-oxa-13,20,24-tr iazanonacos-1-yl]-4-hydroxy-2-hydroxymethylpyrrolidine
ttgtggttgccaagtaaagta

SEQ ID NO: 886 - RNA, 21 nt, synthetic construct
  source 1..21: mol_type = other RNA
  modified_base 1: mod_base = OTHER; note = 2'-O-methyluridine-3'-phosphorothioate
  modified_base 2: mod_base = OTHER; note = 2'-O-methylguanosine-3'- phosphorothioate
  modified_base 3: mod_base = OTHER; note = 2'-O-methylguanosine-3'-phosphate
  modified_base 4: mod_base = OTHER; note = 2'-O-methyluridine-3'-phosphate
  modified_base 5: mod_base = OTHER; note = 2'-O-methyluridine-3'-phosphate
  modified_base 6: mod_base = OTHER; note = 2'-O-hexadecyl-guanosine-3'-phosphate
  modified_base 7: mod_base = OTHER; note = 2'-fluorocytidine-3'-phosphate
  modified_base 8: mod_base = OTHER; note = 2'-O-methylcytidine-3'-phosphate
  modified_base 9: mod_base = OTHER; note = 2'-fluoroadenosine-3'-phosphate
  modified_base 10: mod_base = OTHER; note = 2'-fluoroadenosine-3'-phosphate
  modified_base 11: mod_base = OTHER; note = 2'-fluoroguanosine-3'-phosphate
  modified_base 12: mod_base = OTHER; note = 2'-O-methyluridine-3'-phosphate
  modified_base 13: mod_base = OTHER; note = 2'-O-methyladenosine-3'-phosphate
  modified_base 14: mod_base = OTHER; note = 2'-O-methyladenosine-3'-phosphate
  modified_base 15: mod_base = OTHER; note = 2'-O-methyladenosine-3'-phosphate
  modified_base 16: mod_base = OTHER; note = 2'-O-methylguanosine-3'-phosphate
  modified_base 17: mod_base = OTHER; note = 2'-O-methyluridine-3'-phosphate
  modified_base 18: mod_base = OTHER; note = 2'-O-methylguanosine-3'-phosphate
  modified_base 19: mod_base = OTHER; note = 2'-O-methylguanosine-3'-phosphate
  modified_base 20: mod_base = OTHER; note = 2'-O-methyluridine-3'-phosphate
  modified_base 21: mod_base = OTHER; note = 2'-O-methyladenosine-3'-phosphate N-[tris(GalNAc-alkyl)-amidodecanoyl)]-4-hydroxyprolinol Hyp-(GalNAc-alkyl)3 (2S,4R)-1-[29-[[2-(acetylamino)-2-deoxy-beta-D-galactopyran osyl]oxy]-14,14-bis[[3-[[3-[[5-[[2-(acetylamino)-2-deoxy-be ta-D-galactopyranosyl]oxy]-1-oxopentyl]amino]propyl]amino]- 3-oxopropoxy]methyl]-1,12,19,25-tetraoxo-16-oxa-13,20,24-tr iazanonacos-1-yl]-4-hydroxy-2-hydroxymethylpyrrolidine
tggttgccaagtaaagtggta

SEQ ID NO: 887 - RNA, 21 nt, synthetic construct
  source 1..21: mol_type = other RNA
  modified_base 1: mod_base = OTHER; note = 2'-O-methyluridine-3'-phosphorothioate
  modified_base 2: mod_base = OTHER; note = 2'-O-methylguanosine-3'- phosphorothioate
  modified_base 3: mod_base = OTHER; note = 2'-O-methylguanosine-3'-phosphate
  modified_base 4: mod_base = OTHER; note = 2'-O-methyluridine-3'-phosphate
  modified_base 5: mod_base = OTHER; note = 2'-O-methyluridine-3'-phosphate
  modified_base 6: mod_base = OTHER; note = 2'-O-hexadecyl-guanosine-3'-phosphate
  modified_base 7: mod_base = OTHER; note = 2'-O-methylcytidine-3'-phosphate
  modified_base 8: mod_base = OTHER; note = 2'-O-methylcytidine-3'-phosphate
  modified_base 9: mod_base = OTHER; note = 2'-fluoroadenosine-3'-phosphate
  modified_base 10: mod_base = OTHER; note = 2'-fluoroadenosine-3'-phosphate
  modified_base 11: mod_base = OTHER; note = 2'-fluoroguanosine-3'-phosphate
  modified_base 12: mod_base = OTHER; note = 2'-O-methyluridine-3'-phosphate
  modified_base 13: mod_base = OTHER; note = 2'-O-methyladenosine-3'-phosphate
  modified_base 14: mod_base = OTHER; note = 2'-O-methyladenosine-3'-phosphate
  modified_base 15: mod_base = OTHER; note = 2'-O-methyladenosine-3'-phosphate
  modified_base 16: mod_base = OTHER; note = 2'-O-methylguanosine-3'-phosphate
  modified_base 17: mod_base = OTHER; note = 2'-O-methyluridine-3'-phosphate
  modified_base 18: mod_base = OTHER; note = 2'-O-methylguanosine-3'-phosphate
  modified_base 19: mod_base = OTHER; note = 2'-O-methylguanosine-3'-phosphate
  modified_base 20: mod_base = OTHER; note = 2'-O-methyluridine-3'-phosphate
  modified_base 21: mod_base = OTHER; note = 2'-O-methyladenosine-3'-phosphate N-[tris(GalNAc-alkyl)-amidodecanoyl)]-4-hydroxyprolinol Hyp-(GalNAc-alkyl)3 (2S,4R)-1-[29-[[2-(acetylamino)-2-deoxy-beta-D-galactopyran osyl]oxy]-14,14-bis[[3-[[3-[[5-[[2-(acetylamino)-2-deoxy-be ta-D-galactopyranosyl]oxy]-1-oxopentyl]amino]propyl]amino]- 3-oxopropoxy]methyl]-1,12,19,25-tetraoxo-16-oxa-13,20,24-tr iazanonacos-1-yl]-4-hydroxy-2-hydroxymethylpyrrolidine
tggttgccaagtaaagtggta

SEQ ID NO: 888 - RNA, 21 nt, synthetic construct
  source 1..21: mol_type = other RNA
  modified_base 1: mod_base = OTHER; note = 2'-O-methylguanosine-3'- phosphorothioate
  modified_base 2: mod_base = OTHER; note = 2'-O-methylguanosine-3'- phosphorothioate
  modified_base 3: mod_base = OTHER; note = 2'-O-methyluridine-3'-phosphate
  modified_base 4: mod_base = OTHER; note = 2'-O-methyluridine-3'-phosphate
  modified_base 5: mod_base = OTHER; note = 2'-O-methylguanosine-3'-phosphate
  modified_base 6: mod_base = OTHER; note = 2'-O-hexadecyl-cytidine-3'-phosphate
  modified_base 7: mod_base = OTHER; note = 2'-fluorocytidine-3'-phosphate
  modified_base 8: mod_base = OTHER; note = 2'-O-methyladenosine-3'-phosphate
  modified_base 9: mod_base = OTHER; note = 2'-fluoroadenosine-3'-phosphate
  modified_base 10: mod_base = OTHER; note = 2'-fluoroguanosine-3'-phosphate
  modified_base 11: mod_base = OTHER; note = 2'-fluorouridine-3'-phosphate
  modified_base 12: mod_base = OTHER; note = 2'-O-methyladenosine-3'-phosphate
  modified_base 13: mod_base = OTHER; note = 2'-O-methyladenosine-3'-phosphate
  modified_base 14: mod_base = OTHER; note = 2'-O-methyladenosine-3'-phosphate
  modified_base 15: mod_base = OTHER; note = 2'-O-methylguanosine-3'-phosphate
  modified_base 16: mod_base = OTHER; note = 2'-O-methyluridine-3'-phosphate
  modified_base 17: mod_base = OTHER; note = 2'-O-methylguanosine-3'-phosphate
  modified_base 18: mod_base = OTHER; note = 2'-O-methylguanosine-3'-phosphate
  modified_base 19: mod_base = OTHER; note = 2'-O-methyluridine-3'-phosphate
  modified_base 20: mod_base = OTHER; note = 2'-O-methylguanosine-3'-phosphate
  modified_base 21: mod_base = OTHER; note = 2'-O-methyladenosine-3'-phosphate N-[tris(GalNAc-alkyl)-amidodecanoyl)]-4-hydroxyprolinol Hyp-(GalNAc-alkyl)3 (2S,4R)-1-[29-[[2-(acetylamino)-2-deoxy-beta-D-galactopyran osyl]oxy]-14,14-bis[[3-[[3-[[5-[[2-(acetylamino)-2-deoxy-be ta-D-galactopyranosyl]oxy]-1-oxopentyl]amino]propyl]amino]- 3-oxopropoxy]methyl]-1,12,19,25-tetraoxo-16-oxa-13,20,24-tr iazanonacos-1-yl]-4-hydroxy-2-hydroxymethylpyrrolidine
ggttgccaagtaaagtggtga

SEQ ID NO: 889 - RNA, 21 nt, synthetic construct
  source 1..21: mol_type = other RNA
  modified_base 1: mod_base = OTHER; note = 2'-O-methylguanosine-3'- phosphorothioate
  modified_base 2: mod_base = OTHER; note = 2'-O-methylguanosine-3'- phosphorothioate
  modified_base 3: mod_base = OTHER; note = 2'-O-methyluridine-3'-phosphate
  modified_base 4: mod_base = OTHER; note = 2'-O-methyluridine-3'-phosphate
  modified_base 5: mod_base = OTHER; note = 2'-O-methylguanosine-3'-phosphate
  modified_base 6: mod_base = OTHER; note = 2'-O-hexadecyl-cytidine-3'-phosphate
  modified_base 7: mod_base = OTHER; note = 2'-O-methylcytidine-3'-phosphate
  modified_base 8: mod_base = OTHER; note = 2'-O-methyladenosine-3'-phosphate
  modified_base 9: mod_base = OTHER; note = 2'-fluoroadenosine-3'-phosphate
  modified_base 10: mod_base = OTHER; note = 2'-fluoroguanosine-3'-phosphate
  modified_base 11: mod_base = OTHER; note = 2'-fluorouridine-3'-phosphate
  modified_base 12: mod_base = OTHER; note = 2'-O-methyladenosine-3'-phosphate
  modified_base 13: mod_base = OTHER; note = 2'-O-methyladenosine-3'-phosphate
  modified_base 14: mod_base = OTHER; note = 2'-O-methyladenosine-3'-phosphate
  modified_base 15: mod_base = OTHER; note = 2'-O-methylguanosine-3'-phosphate
  modified_base 16: mod_base = OTHER; note = 2'-O-methyluridine-3'-phosphate
  modified_base 17: mod_base = OTHER; note = 2'-O-methylguanosine-3'-phosphate
  modified_base 18: mod_base = OTHER; note = 2'-O-methylguanosine-3'-phosphate
  modified_base 19: mod_base = OTHER; note = 2'-O-methyluridine-3'-phosphate
  modified_base 20: mod_base = OTHER; note = 2'-O-methylguanosine-3'-phosphate
  modified_base 21: mod_base = OTHER; note = 2'-O-methyladenosine-3'-phosphate N-[tris(GalNAc-alkyl)-amidodecanoyl)]-4-hydroxyprolinol Hyp-(GalNAc-alkyl)3 (2S,4R)-1-[29-[[2-(acetylamino)-2-deoxy-beta-D-galactopyran osyl]oxy]-14,14-bis[[3-[[3-[[5-[[2-(acetylamino)-2-deoxy-be ta-D-galactopyranosyl]oxy]-1-oxopentyl]amino]propyl]amino]- 3-oxopropoxy]methyl]-1,12,19,25-tetraoxo-16-oxa-13,20,24-tr iazanonacos-1-yl]-4-hydroxy-2-hydroxymethylpyrrolidine
ggttgccaagtaaagtggtga

SEQ ID NO: 890 - RNA, 21 nt, synthetic construct
  source 1..21: mol_type = other RNA
  modified_base 1: mod_base = OTHER; note = 2'-O-methylguanosine-3'- phosphorothioate
  modified_base 2: mod_base = OTHER; note = 2'-O-methylcytidine-3'- phosphorothioate
  modified_base 3: mod_base = OTHER; note = 2'-O-methylcytidine-3'-phosphate
  modified_base 4: mod_base = OTHER; note = 2'-O-methyladenosine-3'-phosphate
  modified_base 5: mod_base = OTHER; note = 2'-O-methyladenosine-3'-phosphate
  modified_base 6: mod_base = OTHER; note = 2'-O-hexadecyl-guanosine-3'-phosphate
  modified_base 7: mod_base = OTHER; note = 2'-fluorouridine-3'-phosphate
  modified_base 8: mod_base = OTHER; note = 2'-O-methyladenosine-3'-phosphate
  modified_base 9: mod_base = OTHER; note = 2'-fluoroadenosine-3'-phosphate
  modified_base 10: mod_base = OTHER; note = 2'-fluoroadenosine-3'-phosphate
  modified_base 11: mod_base = OTHER; note = 2'-fluoroguanosine-3'-phosphate
  modified_base 12: mod_base = OTHER; note = 2'-O-methyluridine-3'-phosphate
  modified_base 13: mod_base = OTHER; note = 2'-O-methylguanosine-3'-phosphate
  modified_base 14: mod_base = OTHER; note = 2'-O-methylguanosine-3'-phosphate
  modified_base 15: mod_base = OTHER; note = 2'-O-methyluridine-3'-phosphate
  modified_base 16: mod_base = OTHER; note = 2'-O-methylguanosine-3'-phosphate
  modified_base 17: mod_base = OTHER; note = 2'-O-methyladenosine-3'-phosphate
  modified_base 18: mod_base = OTHER; note = 2'-O-methyladenosine-3'-phosphate
  modified_base 19: mod_base = OTHER; note = 2'-O-methylcytidine-3'-phosphate
  modified_base 20: mod_base = OTHER; note = 2'-O-methyluridine-3'-phosphate
  modified_base 21: mod_base = OTHER; note = 2'-O-methyladenosine-3'-phosphate N-[tris(GalNAc-alkyl)-amidodecanoyl)]-4-hydroxyprolinol Hyp-(GalNAc-alkyl)3 (2S,4R)-1-[29-[[2-(acetylamino)-2-deoxy-beta-D-galactopyran osyl]oxy]-14,14-bis[[3-[[3-[[5-[[2-(acetylamino)-2-deoxy-be ta-D-galactopyranosyl]oxy]-1-oxopentyl]amino]propyl]amino]- 3-oxopropoxy]methyl]-1,12,19,25-tetraoxo-16-oxa-13,20,24-tr iazanonacos-1-yl]-4-hydroxy-2-hydroxymethylpyrrolidine
gccaagtaaagtggtgaacta

SEQ ID NO: 891 - RNA, 21 nt, synthetic construct
  source 1..21: mol_type = other RNA
  modified_base 1: mod_base = OTHER; note = 2'-O-methylcytidine-3'- phosphorothioate
  modified_base 2: mod_base = OTHER; note = 2'-O-methyladenosine-3'- phosphorothioate
  modified_base 3: mod_base = OTHER; note = 2'-O-methyladenosine-3'-phosphate
  modified_base 4: mod_base = OTHER; note = 2'-O-methylguanosine-3'-phosphate
  modified_base 5: mod_base = OTHER; note = 2'-O-methyluridine-3'-phosphate
  modified_base 6: mod_base = OTHER; note = 2'-O-hexadecyl-adenosine-3'-phosphate
  modified_base 7: mod_base = OTHER; note = 2'-fluoroadenosine-3'-phosphate
  modified_base 8: mod_base = OTHER; note = 2'-O-methyladenosine-3'-phosphate
  modified_base 9: mod_base = OTHER; note = 2'-fluoroguanosine-3'-phosphate
  modified_base 10: mod_base = OTHER; note = 2'-fluorouridine-3'-phosphate
  modified_base 11: mod_base = OTHER; note = 2'-fluoroguanosine-3'-phosphate
  modified_base 12: mod_base = OTHER; note = 2'-O-methylguanosine-3'-phosphate
  modified_base 13: mod_base = OTHER; note = 2'-O-methyluridine-3'-phosphate
  modified_base 14: mod_base = OTHER; note = 2'-O-methylguanosine-3'-phosphate
  modified_base 15: mod_base = OTHER; note = 2'-O-methyladenosine-3'-phosphate
  modified_base 16: mod_base = OTHER; note = 2'-O-methyladenosine-3'-phosphate
  modified_base 17: mod_base = OTHER; note = 2'-O-methylcytidine-3'-phosphate
  modified_base 18: mod_base = OTHER; note = 2'-O-methyluridine-3'-phosphate
  modified_base 19: mod_base = OTHER; note = 2'-O-methyluridine-3'-phosphate
  modified_base 20: mod_base = OTHER; note = 2'-O-methyladenosine-3'-phosphate
  modified_base 21: mod_base = OTHER; note = 2'-O-methyladenosine-3'-phosphate N-[tris(GalNAc-alkyl)-amidodecanoyl)]-4-hydroxyprolinol Hyp-(GalNAc-alkyl)3 (2S,4R)-1-[29-[[2-(acetylamino)-2-deoxy-beta-D-galactopyran osyl]oxy]-14,14-bis[[3-[[3-[[5-[[2-(acetylamino)-2-deoxy-be ta-D-galactopyranosyl]oxy]-1-oxopentyl]amino]propyl]amino]- 3-oxopropoxy]methyl]-1,12,19,25-tetraoxo-16-oxa-13,20,24-tr iazanonacos-1-yl]-4-hydroxy-2-hydroxymethylpyrrolidine
caagtaaagtggtgaacttaa

SEQ ID NO: 892 - RNA, 21 nt, synthetic construct
  source 1..21: mol_type = other RNA
  modified_base 1: mod_base = OTHER; note = 2'-O-methyladenosine-3'- phosphorothioate
  modified_base 2: mod_base = OTHER; note = 2'-O-methyladenosine-3'- phosphorothioate
  modified_base 3: mod_base = OTHER; note = 2'-O-methylguanosine-3'-phosphate
  modified_base 4: mod_base = OTHER; note = 2'-O-methyluridine-3'-phosphate
  modified_base 5: mod_base = OTHER; note = 2'-O-methyladenosine-3'-phosphate
  modified_base 6: mod_base = OTHER; note = 2'-O-hexadecyl-adenosine-3'-phosphate
  modified_base 7: mod_base = OTHER; note = 2'-fluoroadenosine-3'-phosphate
  modified_base 8: mod_base = OTHER; note = 2'-O-methylguanosine-3'-phosphate
  modified_base 9: mod_base = OTHER; note = 2'-fluorouridine-3'-phosphate
  modified_base 10: mod_base = OTHER; note = 2'-fluoroguanosine-3'-phosphate
  modified_base 11: mod_base = OTHER; note = 2'-fluoroguanosine-3'-phosphate
  modified_base 12: mod_base = OTHER; note = 2'-O-methyluridine-3'-phosphate
  modified_base 13: mod_base = OTHER; note = 2'-O-methylguanosine-3'-phosphate
  modified_base 14: mod_base = OTHER; note = 2'-O-methyladenosine-3'-phosphate
  modified_base 15: mod_base = OTHER; note = 2'-O-methyladenosine-3'-phosphate
  modified_base 16: mod_base = OTHER; note = 2'-O-methylcytidine-3'-phosphate
  modified_base 17: mod_base = OTHER; note = 2'-O-methyluridine-3'-phosphate
  modified_base 18: mod_base = OTHER; note = 2'-O-methyluridine-3'-phosphate
  modified_base 19: mod_base = OTHER; note = 2'-O-methyladenosine-3'-phosphate
  modified_base 20: mod_base = OTHER; note = 2'-O-methylcytidine-3'-phosphate
  modified_base 21: mod_base = OTHER; note = 2'-O-methyladenosine-3'-phosphate N-[tris(GalNAc-alkyl)-amidodecanoyl)]-4-hydroxyprolinol Hyp-(GalNAc-alkyl)3 (2S,4R)-1-[29-[[2-(acetylamino)-2-deoxy-beta-D-galactopyran osyl]oxy]-14,14-bis[[3-[[3-[[5-[[2-(acetylamino)-2-deoxy-be ta-D-galactopyranosyl]oxy]-1-oxopentyl]amino]propyl]amino]- 3-oxopropoxy]methyl]-1,12,19,25-tetraoxo-16-oxa-13,20,24-tr iazanonacos-1-yl]-4-hydroxy-2-hydroxymethylpyrrolidine
aagtaaagtggtgaacttaca

SEQ ID NO: 893 - RNA, 21 nt, synthetic construct
  source 1..21: mol_type = other RNA
  modified_base 1: mod_base = OTHER; note = 2'-O-methyladenosine-3'- phosphorothioate
  modified_base 2: mod_base = OTHER; note = 2'-O-methylguanosine-3'- phosphorothioate
  modified_base 3: mod_base = OTHER; note = 2'-O-methyluridine-3'-phosphate
  modified_base 4: mod_base = OTHER; note = 2'-O-methyladenosine-3'-phosphate
  modified_base 5: mod_base = OTHER; note = 2'-O-methyladenosine-3'-phosphate
  modified_base 6: mod_base = OTHER; note = 2'-O-hexadecyl-adenosine-3'-phosphate
  modified_base 7: mod_base = OTHER; note = 2'-fluoroguanosine-3'-phosphate
  modified_base 8: mod_base = OTHER; note = 2'-O-methyluridine-3'-phosphate
  modified_base 9: mod_base = OTHER; note = 2'-fluoroguanosine-3'-phosphate
  modified_base 10: mod_base = OTHER; note = 2'-fluoroguanosine-3'-phosphate
  modified_base 11: mod_base = OTHER; note = 2'-fluorouridine-3'-phosphate
  modified_base 12: mod_base = OTHER; note = 2'-O-methylguanosine-3'-phosphate
  modified_base 13: mod_base = OTHER; note = 2'-O-methyladenosine-3'-phosphate
  modified_base 14: mod_base = OTHER; note = 2'-O-methyladenosine-3'-phosphate
  modified_base 15: mod_base = OTHER; note = 2'-O-methylcytidine-3'-phosphate
  modified_base 16: mod_base = OTHER; note = 2'-O-methyluridine-3'-phosphate
  modified_base 17: mod_base = OTHER; note = 2'-O-methyluridine-3'-phosphate
  modified_base 18: mod_base = OTHER; note = 2'-O-methyladenosine-3'-phosphate
  modified_base 19: mod_base = OTHER; note = 2'-O-methylcytidine-3'-phosphate
  modified_base 20: mod_base = OTHER; note = 2'-O-methylguanosine-3'-phosphate
  modified_base 21: mod_base = OTHER; note = 2'-O-methyladenosine-3'-phosphate N-[tris(GalNAc-alkyl)-amidodecanoyl)]-4-hydroxyprolinol Hyp-(GalNAc-alkyl)3 (2S,4R)-1-[29-[[2-(acetylamino)-2-deoxy-beta-D-galactopyran osyl]oxy]-14,14-bis[[3-[[3-[[5-[[2-(acetylamino)-2-deoxy-be ta-D-galactopyranosyl]oxy]-1-oxopentyl]amino]propyl]amino]- 3-oxopropoxy]methyl]-1,12,19,25-tetraoxo-16-oxa-13,20,24-tr iazanonacos-1-yl]-4-hydroxy-2-hydroxymethylpyrrolidine
agtaaagtggtgaacttacga

SEQ ID NO: 894 - RNA, 21 nt, synthetic construct
  source 1..21: mol_type = other RNA
  modified_base 1: mod_base = OTHER; note = 2'-O-methyladenosine-3'- phosphorothioate
  modified_base 2: mod_base = OTHER; note = 2'-O-methylguanosine-3'- phosphorothioate
  modified_base 3: mod_base = OTHER; note = 2'-O-methyluridine-3'-phosphate
  modified_base 4: mod_base = OTHER; note = 2'-O-methyladenosine-3'-phosphate
  modified_base 5: mod_base = OTHER; note = 2'-O-methyladenosine-3'-phosphate
  modified_base 6: mod_base = OTHER; note = 2'-O-hexadecyl-adenosine-3'-phosphate
  modified_base 7: mod_base = OTHER; note = 2'-O-methylguanosine-3'-phosphate
  modified_base 8: mod_base = OTHER; note = 2'-O-methyluridine-3'-phosphate
  modified_base 9: mod_base = OTHER; note = 2'-fluoroguanosine-3'-phosphate
  modified_base 10: mod_base = OTHER; note = 2'-fluoroguanosine-3'-phosphate
  modified_base 11: mod_base = OTHER; note = 2'-fluorouridine-3'-phosphate
  modified_base 12: mod_base = OTHER; note = 2'-O-methylguanosine-3'-phosphate
  modified_base 13: mod_base = OTHER; note = 2'-O-methyladenosine-3'-phosphate
  modified_base 14: mod_base = OTHER; note = 2'-O-methyladenosine-3'-phosphate
  modified_base 15: mod_base = OTHER; note = 2'-O-methylcytidine-3'-phosphate
  modified_base 16: mod_base = OTHER; note = 2'-O-methyluridine-3'-phosphate
  modified_base 17: mod_base = OTHER; note = 2'-O-methyluridine-3'-phosphate
  modified_base 18: mod_base = OTHER; note = 2'-O-methyladenosine-3'-phosphate
  modified_base 19: mod_base = OTHER; note = 2'-O-methylcytidine-3'-phosphate
  modified_base 20: mod_base = OTHER; note = 2'-O-methylguanosine-3'-phosphate
  modified_base 21: mod_base = OTHER; note = 2'-O-methyladenosine-3'-phosphate N-[tris(GalNAc-alkyl)-amidodecanoyl)]-4-hydroxyprolinol Hyp-(GalNAc-alkyl)3 (2S,4R)-1-[29-[[2-(acetylamino)-2-deoxy-beta-D-galactopyran osyl]oxy]-14,14-bis[[3-[[3-[[5-[[2-(acetylamino)-2-deoxy-be ta-D-galactopyranosyl]oxy]-1-oxopentyl]amino]propyl]amino]- 3-oxopropoxy]methyl]-1,12,19,25-tetraoxo-16-oxa-13,20,24-tr iazanonacos-1-yl]-4-hydroxy-2-hydroxymethylpyrrolidine
agtaaagtggtgaacttacga

SEQ ID NO: 895 - RNA, 21 nt, synthetic construct
  source 1..21: mol_type = other RNA
  modified_base 1: mod_base = OTHER; note = 2'-O-methylguanosine-3'- phosphorothioate
  modified_base 2: mod_base = OTHER; note = 2'-O-methyluridine-3'-phosphorothioate
  modified_base 3: mod_base = OTHER; note = 2'-O-methyladenosine-3'-phosphate
  modified_base 4: mod_base = OTHER; note = 2'-O-methyladenosine-3'-phosphate
  modified_base 5: mod_base = OTHER; note = 2'-O-methyladenosine-3'-phosphate
  modified_base 6: mod_base = OTHER; note = 2'-O-hexadecyl-guanosine-3'-phosphate
  modified_base 7: mod_base = OTHER; note = 2'-fluorouridine-3'-phosphate
  modified_base 8: mod_base = OTHER; note = 2'-O-methylguanosine-3'-phosphate
  modified_base 9: mod_base = OTHER; note = 2'-fluoroguanosine-3'-phosphate
  modified_base 10: mod_base = OTHER; note = 2'-fluorouridine-3'-phosphate
  modified_base 11: mod_base = OTHER; note = 2'-fluoroguanosine-3'-phosphate
  modified_base 12: mod_base = OTHER; note = 2'-O-methyladenosine-3'-phosphate
  modified_base 13: mod_base = OTHER; note = 2'-O-methyladenosine-3'-phosphate
  modified_base 14: mod_base = OTHER; note = 2'-O-methylcytidine-3'-phosphate
  modified_base 15: mod_base = OTHER; note = 2'-O-methyluridine-3'-phosphate
  modified_base 16: mod_base = OTHER; note = 2'-O-methyluridine-3'-phosphate
  modified_base 17: mod_base = OTHER; note = 2'-O-methyladenosine-3'-phosphate
  modified_base 18: mod_base = OTHER; note = 2'-O-methylcytidine-3'-phosphate
  modified_base 19: mod_base = OTHER; note = 2'-O-methylguanosine-3'-phosphate
  modified_base 20: mod_base = OTHER; note = 2'-O-methyluridine-3'-phosphate
  modified_base 21: mod_base = OTHER; note = 2'-O-methyladenosine-3'-phosphate N-[tris(GalNAc-alkyl)-amidodecanoyl)]-4-hydroxyprolinol Hyp-(GalNAc-alkyl)3 (2S,4R)-1-[29-[[2-(acetylamino)-2-deoxy-beta-D-galactopyran osyl]oxy]-14,14-bis[[3-[[3-[[5-[[2-(acetylamino)-2-deoxy-be ta-D-galactopyranosyl]oxy]-1-oxopentyl]amino]propyl]amino]- 3-oxopropoxy]methyl]-1,12,19,25-tetraoxo-16-oxa-13,20,24-tr iazanonacos-1-yl]-4-hydroxy-2-hydroxymethylpyrrolidine
gtaaagtggtgaacttacgta

SEQ ID NO: 896 - RNA, 21 nt, synthetic construct
  source 1..21: mol_type = other RNA
  modified_base 1: mod_base = OTHER; note = 2'-O-methylguanosine-3'- phosphorothioate
  modified_base 2: mod_base = OTHER; note = 2'-O-methyluridine-3'-phosphorothioate
  modified_base 3: mod_base = OTHER; note = 2'-O-methyladenosine-3'-phosphate
  modified_base 4: mod_base = OTHER; note = 2'-O-methyladenosine-3'-phosphate
  modified_base 5: mod_base = OTHER; note = 2'-O-methyladenosine-3'-phosphate
  modified_base 6: mod_base = OTHER; note = 2'-O-hexadecyl-guanosine-3'-phosphate
  modified_base 7: mod_base = OTHER; note = 2'-O-methyluridine-3'-phosphate
  modified_base 8: mod_base = OTHER; note = 2'-O-methylguanosine-3'-phosphate
  modified_base 9: mod_base = OTHER; note = 2'-fluoroguanosine-3'-phosphate
  modified_base 10: mod_base = OTHER; note = 2'-fluorouridine-3'-phosphate
  modified_base 11: mod_base = OTHER; note = 2'-fluoroguanosine-3'-phosphate
  modified_base 12: mod_base = OTHER; note = 2'-O-methyladenosine-3'-phosphate
  modified_base 13: mod_base = OTHER; note = 2'-O-methyladenosine-3'-phosphate
  modified_base 14: mod_base = OTHER; note = 2'-O-methylcytidine-3'-phosphate
  modified_base 15: mod_base = OTHER; note = 2'-O-methyluridine-3'-phosphate
  modified_base 16: mod_base = OTHER; note = 2'-O-methyluridine-3'-phosphate
  modified_base 17: mod_base = OTHER; note = 2'-O-methyladenosine-3'-phosphate
  modified_base 18: mod_base = OTHER; note = 2'-O-methylcytidine-3'-phosphate
  modified_base 19: mod_base = OTHER; note = 2'-O-methylguanosine-3'-phosphate
  modified_base 20: mod_base = OTHER; note = 2'-O-methyluridine-3'-phosphate
  modified_base 21: mod_base = OTHER; note = 2'-O-methyladenosine-3'-phosphate N-[tris(GalNAc-alkyl)-amidodecanoyl)]-4-hydroxyprolinol Hyp-(GalNAc-alkyl)3 (2S,4R)-1-[29-[[2-(acetylamino)-2-deoxy-beta-D-galactopyran osyl]oxy]-14,14-bis[[3-[[3-[[5-[[2-(acetylamino)-2-deoxy-be ta-D-galactopyranosyl]oxy]-1-oxopentyl]amino]propyl]amino]- 3-oxopropoxy]methyl]-1,12,19,25-tetraoxo-16-oxa-13,20,24-tr iazanonacos-1-yl]-4-hydroxy-2-hydroxymethylpyrrolidine
gtaaagtggtgaacttacgta

SEQ ID NO: 897 - RNA, 21 nt, synthetic construct
  source 1..21: mol_type = other RNA
  modified_base 1: mod_base = OTHER; note = 2'-O-methyluridine-3'-phosphorothioate
  modified_base 2: mod_base = OTHER; note = 2'-O-methyladenosine-3'- phosphorothioate
  modified_base 3: mod_base = OTHER; note = 2'-O-methyladenosine-3'-phosphate
  modified_base 4: mod_base = OTHER; note = 2'-O-methyladenosine-3'-phosphate
  modified_base 5: mod_base = OTHER; note = 2'-O-methylguanosine-3'-phosphate
  modified_base 6: mod_base = OTHER; note = 2'-O-hexadecyl-uridine-3'-phosphate
  modified_base 7: mod_base = OTHER; note = 2'-fluoroguanosine-3'-phosphate
  modified_base 8: mod_base = OTHER; note = 2'-O-methylguanosine-3'-phosphate
  modified_base 9: mod_base = OTHER; note = 2'-fluorouridine-3'-phosphate
  modified_base 10: mod_base = OTHER; note = 2'-fluoroguanosine-3'-phosphate
  modified_base 11: mod_base = OTHER; note = 2'-fluoroadenosine-3'-phosphate
  modified_base 12: mod_base = OTHER; note = 2'-O-methyladenosine-3'-phosphate
  modified_base 13: mod_base = OTHER; note = 2'-O-methylcytidine-3'-phosphate
  modified_base 14: mod_base = OTHER; note = 2'-O-methyluridine-3'-phosphate
  modified_base 15: mod_base = OTHER; note = 2'-O-methyluridine-3'-phosphate
  modified_base 16: mod_base = OTHER; note = 2'-O-methyladenosine-3'-phosphate
  modified_base 17: mod_base = OTHER; note = 2'-O-methylcytidine-3'-phosphate
  modified_base 18: mod_base = OTHER; note = 2'-O-methylguanosine-3'-phosphate
  modified_base 19: mod_base = OTHER; note = 2'-O-methyluridine-3'-phosphate
  modified_base 20: mod_base = OTHER; note = 2'-O-methylguanosine-3'-phosphate
  modified_base 21: mod_base = OTHER; note = 2'-O-methyladenosine-3'-phosphate N-[tris(GalNAc-alkyl)-amidodecanoyl)]-4-hydroxyprolinol Hyp-(GalNAc-alkyl)3 (2S,4R)-1-[29-[[2-(acetylamino)-2-deoxy-beta-D-galactopyran osyl]oxy]-14,14-bis[[3-[[3-[[5-[[2-(acetylamino)-2-deoxy-be ta-D-galactopyranosyl]oxy]-1-oxopentyl]amino]propyl]amino]- 3-oxopropoxy]methyl]-1,12,19,25-tetraoxo-16-oxa-13,20,24-tr iazanonacos-1-yl]-4-hydroxy-2-hydroxymethylpyrrolidine
taaagtggtgaacttacgtga

SEQ ID NO: 898 - RNA, 21 nt, synthetic construct
  source 1..21: mol_type = other RNA
  modified_base 1: mod_base = OTHER; note = 2'-O-methyluridine-3'-phosphorothioate
  modified_base 2: mod_base = OTHER; note = 2'-O-methyladenosine-3'- phosphorothioate
  modified_base 3: mod_base = OTHER; note = 2'-O-methyladenosine-3'-phosphate
  modified_base 4: mod_base = OTHER; note = 2'-O-methyladenosine-3'-phosphate
  modified_base 5: mod_base = OTHER; note = 2'-O-methylguanosine-3'-phosphate
  modified_base 6: mod_base = OTHER; note = 2'-O-hexadecyl-uridine-3'-phosphate
  modified_base 7: mod_base = OTHER; note = 2'-O-methylguanosine-3'-phosphate
  modified_base 8: mod_base = OTHER; note = 2'-O-methylguanosine-3'-phosphate
  modified_base 9: mod_base = OTHER; note = 2'-fluorouridine-3'-phosphate
  modified_base 10: mod_base = OTHER; note = 2'-fluoroguanosine-3'-phosphate
  modified_base 11: mod_base = OTHER; note = 2'-fluoroadenosine-3'-phosphate
  modified_base 12: mod_base = OTHER; note = 2'-O-methyladenosine-3'-phosphate
  modified_base 13: mod_base = OTHER; note = 2'-O-methylcytidine-3'-phosphate
  modified_base 14: mod_base = OTHER; note = 2'-O-methyluridine-3'-phosphate
  modified_base 15: mod_base = OTHER; note = 2'-O-methyluridine-3'-phosphate
  modified_base 16: mod_base = OTHER; note = 2'-O-methyladenosine-3'-phosphate
  modified_base 17: mod_base = OTHER; note = 2'-O-methylcytidine-3'-phosphate
  modified_base 18: mod_base = OTHER; note = 2'-O-methylguanosine-3'-phosphate
  modified_base 19: mod_base = OTHER; note = 2'-O-methyluridine-3'-phosphate
  modified_base 20: mod_base = OTHER; note = 2'-O-methylguanosine-3'-phosphate
  modified_base 21: mod_base = OTHER; note = 2'-O-methyladenosine-3'-phosphate N-[tris(GalNAc-alkyl)-amidodecanoyl)]-4-hydroxyprolinol Hyp-(GalNAc-alkyl)3 (2S,4R)-1-[29-[[2-(acetylamino)-2-deoxy-beta-D-galactopyran osyl]oxy]-14,14-bis[[3-[[3-[[5-[[2-(acetylamino)-2-deoxy-be ta-D-galactopyranosyl]oxy]-1-oxopentyl]amino]propyl]amino]- 3-oxopropoxy]methyl]-1,12,19,25-tetraoxo-16-oxa-13,20,24-tr iazanonacos-1-yl]-4-hydroxy-2-hydroxymethylpyrrolidine
taaagtggtgaacttacgtga

SEQ ID NO: 899 - RNA, 21 nt, synthetic construct
  source 1..21: mol_type = other RNA
  modified_base 1: mod_base = OTHER; note = 2'-O-methyladenosine-3'- phosphorothioate
  modified_base 2: mod_base = OTHER; note = 2'-O-methyladenosine-3'- phosphorothioate
  modified_base 3: mod_base = OTHER; note = 2'-O-methyladenosine-3'-phosphate
  modified_base 4: mod_base = OTHER; note = 2'-O-methylguanosine-3'-phosphate
  modified_base 5: mod_base = OTHER; note = 2'-O-methyluridine-3'-phosphate
  modified_base 6: mod_base = OTHER; note = 2'-O-hexadecyl-guanosine-3'-phosphate
  modified_base 7: mod_base = OTHER; note = 2'-fluoroguanosine-3'-phosphate
  modified_base 8: mod_base = OTHER; note = 2'-O-methyluridine-3'-phosphate
  modified_base 9: mod_base = OTHER; note = 2'-fluoroguanosine-3'-phosphate
  modified_base 10: mod_base = OTHER; note = 2'-fluoroadenosine-3'-phosphate
  modified_base 11: mod_base = OTHER; note = 2'-fluoroadenosine-3'-phosphate
  modified_base 12: mod_base = OTHER; note = 2'-O-methylcytidine-3'-phosphate
  modified_base 13: mod_base = OTHER; note = 2'-O-methyluridine-3'-phosphate
  modified_base 14: mod_base = OTHER; note = 2'-O-methyluridine-3'-phosphate
  modified_base 15: mod_base = OTHER; note = 2'-O-methyladenosine-3'-phosphate
  modified_base 16: mod_base = OTHER; note = 2'-O-methylcytidine-3'-phosphate
  modified_base 17: mod_base = OTHER; note = 2'-O-methylguanosine-3'-phosphate
  modified_base 18: mod_base = OTHER; note = 2'-O-methyluridine-3'-phosphate
  modified_base 19: mod_base = OTHER; note = 2'-O-methylguanosine-3'-phosphate
  modified_base 20: mod_base = OTHER; note = 2'-O-methylguanosine-3'-phosphate
  modified_base 21: mod_base = OTHER; note = 2'-O-methyladenosine-3'-phosphate N-[tris(GalNAc-alkyl)-amidodecanoyl)]-4-hydroxyprolinol Hyp-(GalNAc-alkyl)3 (2S,4R)-1-[29-[[2-(acetylamino)-2-deoxy-beta-D-galactopyran osyl]oxy]-14,14-bis[[3-[[3-[[5-[[2-(acetylamino)-2-deoxy-be ta-D-galactopyranosyl]oxy]-1-oxopentyl]amino]propyl]amino]- 3-oxopropoxy]methyl]-1,12,19,25-tetraoxo-16-oxa-13,20,24-tr iazanonacos-1-yl]-4-hydroxy-2-hydroxymethylpyrrolidine
aaagtggtgaacttacgtgga

SEQ ID NO: 900 - RNA, 21 nt, synthetic construct
  source 1..21: mol_type = other RNA
  modified_base 1: mod_base = OTHER; note = 2'-O-methyladenosine-3'- phosphorothioate
  modified_base 2: mod_base = OTHER; note = 2'-O-methyladenosine-3'- phosphorothioate
  modified_base 3: mod_base = OTHER; note = 2'-O-methyladenosine-3'-phosphate
  modified_base 4: mod_base = OTHER; note = 2'-O-methylguanosine-3'-phosphate
  modified_base 5: mod_base = OTHER; note = 2'-O-methyluridine-3'-phosphate
  modified_base 6: mod_base = OTHER; note = 2'-O-hexadecyl-guanosine-3'-phosphate
  modified_base 7: mod_base = OTHER; note = 2'-O-methylguanosine-3'-phosphate
  modified_base 8: mod_base = OTHER; note = 2'-O-methyluridine-3'-phosphate
  modified_base 9: mod_base = OTHER; note = 2'-fluoroguanosine-3'-phosphate
  modified_base 10: mod_base = OTHER; note = 2'-fluoroadenosine-3'-phosphate
  modified_base 11: mod_base = OTHER; note = 2'-fluoroadenosine-3'-phosphate
  modified_base 12: mod_base = OTHER; note = 2'-O-methylcytidine-3'-phosphate
  modified_base 13: mod_base = OTHER; note = 2'-O-methyluridine-3'-phosphate
  modified_base 14: mod_base = OTHER; note = 2'-O-methyluridine-3'-phosphate
  modified_base 15: mod_base = OTHER; note = 2'-O-methyladenosine-3'-phosphate
  modified_base 16: mod_base = OTHER; note = 2'-O-methylcytidine-3'-phosphate
  modified_base 17: mod_base = OTHER; note = 2'-O-methylguanosine-3'-phosphate
  modified_base 18: mod_base = OTHER; note = 2'-O-methyluridine-3'-phosphate
  modified_base 19: mod_base = OTHER; note = 2'-O-methylguanosine-3'-phosphate
  modified_base 20: mod_base = OTHER; note = 2'-O-methylguanosine-3'-phosphate
  modified_base 21: mod_base = OTHER; note = 2'-O-methyladenosine-3'-phosphate N-[tris(GalNAc-alkyl)-amidodecanoyl)]-4-hydroxyprolinol Hyp-(GalNAc-alkyl)3 (2S,4R)-1-[29-[[2-(acetylamino)-2-deoxy-beta-D-galactopyran osyl]oxy]-14,14-bis[[3-[[3-[[5-[[2-(acetylamino)-2-deoxy-be ta-D-galactopyranosyl]oxy]-1-oxopentyl]amino]propyl]amino]- 3-oxopropoxy]methyl]-1,12,19,25-tetraoxo-16-oxa-13,20,24-tr iazanonacos-1-yl]-4-hydroxy-2-hydroxymethylpyrrolidine
aaagtggtgaacttacgtgga

SEQ ID NO: 901 - RNA, 21 nt, synthetic construct
  source 1..21: mol_type = other RNA
  modified_base 1: mod_base = OTHER; note = 2'-O-methyladenosine-3'- phosphorothioate
  modified_base 2: mod_base = OTHER; note = 2'-O-methyladenosine-3'- phosphorothioate
  modified_base 3: mod_base = OTHER; note = 2'-O-methylguanosine-3'-phosphate
  modified_base 4: mod_base = OTHER; note = 2'-O-methyluridine-3'-phosphate
  modified_base 5: mod_base = OTHER; note = 2'-O-methylguanosine-3'-phosphate
  modified_base 6: mod_base = OTHER; note = 2'-O-hexadecyl-guanosine-3'-phosphate
  modified_base 7: mod_base = OTHER; note = 2'-fluorouridine-3'-phosphate
  modified_base 8: mod_base = OTHER; note = 2'-O-methylguanosine-3'-phosphate
  modified_base 9: mod_base = OTHER; note = 2'-fluoroadenosine-3'-phosphate
  modified_base 10: mod_base = OTHER; note = 2'-fluoroadenosine-3'-phosphate
  modified_base 11: mod_base = OTHER; note = 2'-fluorocytidine-3'-phosphate
  modified_base 12: mod_base = OTHER; note = 2'-O-methyluridine-3'-phosphate
  modified_base 13: mod_base = OTHER; note = 2'-O-methyluridine-3'-phosphate
  modified_base 14: mod_base = OTHER; note = 2'-O-methyladenosine-3'-phosphate
  modified_base 15: mod_base = OTHER; note = 2'-O-methylcytidine-3'-phosphate
  modified_base 16: mod_base = OTHER; note = 2'-O-methylguanosine-3'-phosphate
  modified_base 17: mod_base = OTHER; note = 2'-O-methyluridine-3'-phosphate
  modified_base 18: mod_base = OTHER; note = 2'-O-methylguanosine-3'-phosphate
  modified_base 19: mod_base = OTHER; note = 2'-O-methylguanosine-3'-phosphate
  modified_base 20: mod_base = OTHER; note = 2'-O-methyluridine-3'-phosphate
  modified_base 21: mod_base = OTHER; note = 2'-O-methyladenosine-3'-phosphate N-[tris(GalNAc-alkyl)-amidodecanoyl)]-4-hydroxyprolinol Hyp-(GalNAc-alkyl)3 (2S,4R)-1-[29-[[2-(acetylamino)-2-deoxy-beta-D-galactopyran osyl]oxy]-14,14-bis[[3-[[3-[[5-[[2-(acetylamino)-2-deoxy-be ta-D-galactopyranosyl]oxy]-1-oxopentyl]amino]propyl]amino]- 3-oxopropoxy]methyl]-1,12,19,25-tetraoxo-16-oxa-13,20,24-tr iazanonacos-1-yl]-4-hydroxy-2-hydroxymethylpyrrolidine
aagtggtgaacttacgtggta

SEQ ID NO: 902 - RNA, 21 nt, synthetic construct
  source 1..21: mol_type = other RNA
  modified_base 1: mod_base = OTHER; note = 2'-O-methyladenosine-3'- phosphorothioate
  modified_base 2: mod_base = OTHER; note = 2'-O-methyladenosine-3'- phosphorothioate
  modified_base 3: mod_base = OTHER; note = 2'-O-methylguanosine-3'-phosphate
  modified_base 4: mod_base = OTHER; note = 2'-O-methyluridine-3'-phosphate
  modified_base 5: mod_base = OTHER; note = 2'-O-methylguanosine-3'-phosphate
  modified_base 6: mod_base = OTHER; note = 2'-O-hexadecyl-guanosine-3'-phosphate
  modified_base 7: mod_base = OTHER; note = 2'-O-methyluridine-3'-phosphate
  modified_base 8: mod_base = OTHER; note = 2'-O-methylguanosine-3'-phosphate
  modified_base 9: mod_base = OTHER; note = 2'-fluoroadenosine-3'-phosphate
  modified_base 10: mod_base = OTHER; note = 2'-fluoroadenosine-3'-phosphate
  modified_base 11: mod_base = OTHER; note = 2'-fluorocytidine-3'-phosphate
  modified_base 12: mod_base = OTHER; note = 2'-O-methyluridine-3'-phosphate
  modified_base 13: mod_base = OTHER; note = 2'-O-methyluridine-3'-phosphate
  modified_base 14: mod_base = OTHER; note = 2'-O-methyladenosine-3'-phosphate
  modified_base 15: mod_base = OTHER; note = 2'-O-methylcytidine-3'-phosphate
  modified_base 16: mod_base = OTHER; note = 2'-O-methylguanosine-3'-phosphate
  modified_base 17: mod_base = OTHER; note = 2'-O-methyluridine-3'-phosphate
  modified_base 18: mod_base = OTHER; note = 2'-O-methylguanosine-3'-phosphate
  modified_base 19: mod_base = OTHER; note = 2'-O-methylguanosine-3'-phosphate
  modified_base 20: mod_base = OTHER; note = 2'-O-methyluridine-3'-phosphate
  modified_base 21: mod_base = OTHER; note = 2'-O-methyladenosine-3'-phosphate N-[tris(GalNAc-alkyl)-amidodecanoyl)]-4-hydroxyprolinol Hyp-(GalNAc-alkyl)3 (2S,4R)-1-[29-[[2-(acetylamino)-2-deoxy-beta-D-galactopyran osyl]oxy]-14,14-bis[[3-[[3-[[5-[[2-(acetylamino)-2-deoxy-be ta-D-galactopyranosyl]oxy]-1-oxopentyl]amino]propyl]amino]- 3-oxopropoxy]methyl]-1,12,19,25-tetraoxo-16-oxa-13,20,24-tr iazanonacos-1-yl]-4-hydroxy-2-hydroxymethylpyrrolidine
aagtggtgaacttacgtggta

SEQ ID NO: 903 - RNA, 21 nt, synthetic construct
  source 1..21: mol_type = other RNA
  modified_base 1: mod_base = OTHER; note = 2'-O-methyladenosine-3'- phosphorothioate
  modified_base 2: mod_base = OTHER; note = 2'-O-methylguanosine-3'- phosphorothioate
  modified_base 3: mod_base = OTHER; note = 2'-O-methyluridine-3'-phosphate
  modified_base 4: mod_base = OTHER; note = 2'-O-methylguanosine-3'-phosphate
  modified_base 5: mod_base = OTHER; note = 2'-O-methylguanosine-3'-phosphate
  modified_base 6: mod_base = OTHER; note = 2'-O-hexadecyl-uridine-3'-phosphate
  modified_base 7: mod_base = OTHER; note = 2'-fluoroguanosine-3'-phosphate
  modified_base 8: mod_base = OTHER; note = 2'-O-methyladenosine-3'-phosphate
  modified_base 9: mod_base = OTHER; note = 2'-fluoroadenosine-3'-phosphate
  modified_base 10: mod_base = OTHER; note = 2'-fluorocytidine-3'-phosphate
  modified_base 11: mod_base = OTHER; note = 2'-fluorouridine-3'-phosphate
  modified_base 12: mod_base = OTHER; note = 2'-O-methyluridine-3'-phosphate
  modified_base 13: mod_base = OTHER; note = 2'-O-methyladenosine-3'-phosphate
  modified_base 14: mod_base = OTHER; note = 2'-O-methylcytidine-3'-phosphate
  modified_base 15: mod_base = OTHER; note = 2'-O-methylguanosine-3'-phosphate
  modified_base 16: mod_base = OTHER; note = 2'-O-methyluridine-3'-phosphate
  modified_base 17: mod_base = OTHER; note = 2'-O-methylguanosine-3'-phosphate
  modified_base 18: mod_base = OTHER; note = 2'-O-methylguanosine-3'-phosphate
  modified_base 19: mod_base = OTHER; note = 2'-O-methyluridine-3'-phosphate
  modified_base 20: mod_base = OTHER; note = 2'-O-methylguanosine-3'-phosphate
  modified_base 21: mod_base = OTHER; note = 2'-O-methyladenosine-3'-phosphate N-[tris(GalNAc-alkyl)-amidodecanoyl)]-4-hydroxyprolinol Hyp-(GalNAc-alkyl)3 (2S,4R)-1-[29-[[2-(acetylamino)-2-deoxy-beta-D-galactopyran osyl]oxy]-14,14-bis[[3-[[3-[[5-[[2-(acetylamino)-2-deoxy-be ta-D-galactopyranosyl]oxy]-1-oxopentyl]amino]propyl]amino]- 3-oxopropoxy]methyl]-1,12,19,25-tetraoxo-16-oxa-13,20,24-tr iazanonacos-1-yl]-4-hydroxy-2-hydroxymethylpyrrolidine
agtggtgaacttacgtggtga

SEQ ID NO: 904 - RNA, 21 nt, synthetic construct
  source 1..21: mol_type = other RNA
  modified_base 1: mod_base = OTHER; note = 2'-O-methyladenosine-3'- phosphorothioate
  modified_base 2: mod_base = OTHER; note = 2'-O-methylguanosine-3'- phosphorothioate
  modified_base 3: mod_base = OTHER; note = 2'-O-methyluridine-3'-phosphate
  modified_base 4: mod_base = OTHER; note = 2'-O-methylguanosine-3'-phosphate
  modified_base 5: mod_base = OTHER; note = 2'-O-methylguanosine-3'-phosphate
  modified_base 6: mod_base = OTHER; note = 2'-O-hexadecyl-uridine-3'-phosphate
  modified_base 7: mod_base = OTHER; note = 2'-O-methylguanosine-3'-phosphate
  modified_base 8: mod_base = OTHER; note = 2'-O-methyladenosine-3'-phosphate
  modified_base 9: mod_base = OTHER; note = 2'-fluoroadenosine-3'-phosphate
  modified_base 10: mod_base = OTHER; note = 2'-fluorocytidine-3'-phosphate
  modified_base 11: mod_base = OTHER; note = 2'-fluorouridine-3'-phosphate
  modified_base 12: mod_base = OTHER; note = 2'-O-methyluridine-3'-phosphate
  modified_base 13: mod_base = OTHER; note = 2'-O-methyladenosine-3'-phosphate
  modified_base 14: mod_base = OTHER; note = 2'-O-methylcytidine-3'-phosphate
  modified_base 15: mod_base = OTHER; note = 2'-O-methylguanosine-3'-phosphate
  modified_base 16: mod_base = OTHER; note = 2'-O-methyluridine-3'-phosphate
  modified_base 17: mod_base = OTHER; note = 2'-O-methylguanosine-3'-phosphate
  modified_base 18: mod_base = OTHER; note = 2'-O-methylguanosine-3'-phosphate
  modified_base 19: mod_base = OTHER; note = 2'-O-methyluridine-3'-phosphate
  modified_base 20: mod_base = OTHER; note = 2'-O-methylguanosine-3'-phosphate
  modified_base 21: mod_base = OTHER; note = 2'-O-methyladenosine-3'-phosphate N-[tris(GalNAc-alkyl)-amidodecanoyl)]-4-hydroxyprolinol Hyp-(GalNAc-alkyl)3 (2S,4R)-1-[29-[[2-(acetylamino)-2-deoxy-beta-D-galactopyran osyl]oxy]-14,14-bis[[3-[[3-[[5-[[2-(acetylamino)-2-deoxy-be ta-D-galactopyranosyl]oxy]-1-oxopentyl]amino]propyl]amino]- 3-oxopropoxy]methyl]-1,12,19,25-tetraoxo-16-oxa-13,20,24-tr iazanonacos-1-yl]-4-hydroxy-2-hydroxymethylpyrrolidine
agtggtgaacttacgtggtga

SEQ ID NO: 905 - RNA, 21 nt, synthetic construct
  source 1..21: mol_type = other RNA
  modified_base 1: mod_base = OTHER; note = 2'-O-methylguanosine-3'- phosphorothioate
  modified_base 2: mod_base = OTHER; note = 2'-O-methyluridine-3'-phosphorothioate
  modified_base 3: mod_base = OTHER; note = 2'-O-methylguanosine-3'-phosphate
  modified_base 4: mod_base = OTHER; note = 2'-O-methylguanosine-3'-phosphate
  modified_base 5: mod_base = OTHER; note = 2'-O-methyluridine-3'-phosphate
  modified_base 6: mod_base = OTHER; note = 2'-O-hexadecyl-guanosine-3'-phosphate
  modified_base 7: mod_base = OTHER; note = 2'-fluoroadenosine-3'-phosphate
  modified_base 8: mod_base = OTHER; note = 2'-O-methyladenosine-3'-phosphate
  modified_base 9: mod_base = OTHER; note = 2'-fluorocytidine-3'-phosphate
  modified_base 10: mod_base = OTHER; note = 2'-fluorouridine-3'-phosphate
  modified_base 11: mod_base = OTHER; note = 2'-fluorouridine-3'-phosphate
  modified_base 12: mod_base = OTHER; note = 2'-O-methyladenosine-3'-phosphate
  modified_base 13: mod_base = OTHER; note = 2'-O-methylcytidine-3'-phosphate
  modified_base 14: mod_base = OTHER; note = 2'-O-methylguanosine-3'-phosphate
  modified_base 15: mod_base = OTHER; note = 2'-O-methyluridine-3'-phosphate
  modified_base 16: mod_base = OTHER; note = 2'-O-methylguanosine-3'-phosphate
  modified_base 17: mod_base = OTHER; note = 2'-O-methylguanosine-3'-phosphate
  modified_base 18: mod_base = OTHER; note = 2'-O-methyluridine-3'-phosphate
  modified_base 19: mod_base = OTHER; note = 2'-O-methylguanosine-3'-phosphate
  modified_base 20: mod_base = OTHER; note = 2'-O-methyladenosine-3'-phosphate
  modified_base 21: mod_base = OTHER; note = 2'-O-methyladenosine-3'-phosphate N-[tris(GalNAc-alkyl)-amidodecanoyl)]-4-hydroxyprolinol Hyp-(GalNAc-alkyl)3 (2S,4R)-1-[29-[[2-(acetylamino)-2-deoxy-beta-D-galactopyran osyl]oxy]-14,14-bis[[3-[[3-[[5-[[2-(acetylamino)-2-deoxy-be ta-D-galactopyranosyl]oxy]-1-oxopentyl]amino]propyl]amino]- 3-oxopropoxy]methyl]-1,12,19,25-tetraoxo-16-oxa-13,20,24-tr iazanonacos-1-yl]-4-hydroxy-2-hydroxymethylpyrrolidine
gtggtgaacttacgtggtgaa

SEQ ID NO: 906 - RNA, 21 nt, synthetic construct
  source 1..21: mol_type = other RNA
  modified_base 1: mod_base = OTHER; note = 2'-O-methylguanosine-3'- phosphorothioate
  modified_base 2: mod_base = OTHER; note = 2'-O-methyluridine-3'-phosphorothioate
  modified_base 3: mod_base = OTHER; note = 2'-O-methylguanosine-3'-phosphate
  modified_base 4: mod_base = OTHER; note = 2'-O-methylguanosine-3'-phosphate
  modified_base 5: mod_base = OTHER; note = 2'-O-methyluridine-3'-phosphate
  modified_base 6: mod_base = OTHER; note = 2'-O-hexadecyl-guanosine-3'-phosphate
  modified_base 7: mod_base = OTHER; note = 2'-O-methyladenosine-3'-phosphate
  modified_base 8: mod_base = OTHER; note = 2'-O-methyladenosine-3'-phosphate
  modified_base 9: mod_base = OTHER; note = 2'-fluorocytidine-3'-phosphate
  modified_base 10: mod_base = OTHER; note = 2'-fluorouridine-3'-phosphate
  modified_base 11: mod_base = OTHER; note = 2'-fluorouridine-3'-phosphate
  modified_base 12: mod_base = OTHER; note = 2'-O-methyladenosine-3'-phosphate
  modified_base 13: mod_base = OTHER; note = 2'-O-methylcytidine-3'-phosphate
  modified_base 14: mod_base = OTHER; note = 2'-O-methylguanosine-3'-phosphate
  modified_base 15: mod_base = OTHER; note = 2'-O-methyluridine-3'-phosphate
  modified_base 16: mod_base = OTHER; note = 2'-O-methylguanosine-3'-phosphate
  modified_base 17: mod_base = OTHER; note = 2'-O-methylguanosine-3'-phosphate
  modified_base 18: mod_base = OTHER; note = 2'-O-methyluridine-3'-phosphate
  modified_base 19: mod_base = OTHER; note = 2'-O-methylguanosine-3'-phosphate
  modified_base 20: mod_base = OTHER; note = 2'-O-methyladenosine-3'-phosphate
  modified_base 21: mod_base = OTHER; note = 2'-O-methyladenosine-3'-phosphate N-[tris(GalNAc-alkyl)-amidodecanoyl)]-4-hydroxyprolinol Hyp-(GalNAc-alkyl)3 (2S,4R)-1-[29-[[2-(acetylamino)-2-deoxy-beta-D-galactopyran osyl]oxy]-14,14-bis[[3-[[3-[[5-[[2-(acetylamino)-2-deoxy-be ta-D-galactopyranosyl]oxy]-1-oxopentyl]amino]propyl]amino]- 3-oxopropoxy]methyl]-1,12,19,25-tetraoxo-16-oxa-13,20,24-tr iazanonacos-1-yl]-4-hydroxy-2-hydroxymethylpyrrolidine
gtggtgaacttacgtggtgaa

SEQ ID NO: 907 - RNA, 21 nt, synthetic construct
  source 1..21: mol_type = other RNA
  modified_base 1: mod_base = OTHER; note = 2'-O-methylguanosine-3'- phosphorothioate
  modified_base 2: mod_base = OTHER; note = 2'-O-methyluridine-3'-phosphorothioate
  modified_base 3: mod_base = OTHER; note = 2'-O-methylguanosine-3'-phosphate
  modified_base 4: mod_base = OTHER; note = 2'-O-methyladenosine-3'-phosphate
  modified_base 5: mod_base = OTHER; note = 2'-O-methyladenosine-3'-phosphate
  modified_base 6: mod_base = OTHER; note = 2'-O-hexadecyl-cytidine-3'-phosphate
  modified_base 7: mod_base = OTHER; note = 2'-fluorouridine-3'-phosphate
  modified_base 8: mod_base = OTHER; note = 2'-O-methyluridine-3'-phosphate
  modified_base 9: mod_base = OTHER; note = 2'-fluoroadenosine-3'-phosphate
  modified_base 10: mod_base = OTHER; note = 2'-fluorocytidine-3'-phosphate
  modified_base 11: mod_base = OTHER; note = 2'-fluoroguanosine-3'-phosphate
  modified_base 12: mod_base = OTHER; note = 2'-O-methyluridine-3'-phosphate
  modified_base 13: mod_base = OTHER; note = 2'-O-methylguanosine-3'-phosphate
  modified_base 14: mod_base = OTHER; note = 2'-O-methylguanosine-3'-phosphate
  modified_base 15: mod_base = OTHER; note = 2'-O-methyluridine-3'-phosphate
  modified_base 16: mod_base = OTHER; note = 2'-O-methylguanosine-3'-phosphate
  modified_base 17: mod_base = OTHER; note = 2'-O-methyladenosine-3'-phosphate
  modified_base 18: mod_base = OTHER; note = 2'-O-methyluridine-3'-phosphate
  modified_base 19: mod_base = OTHER; note = 2'-O-methyluridine-3'-phosphate
  modified_base 20: mod_base = OTHER; note = 2'-O-methyladenosine-3'-phosphate
  modified_base 21: mod_base = OTHER; note = 2'-O-methyladenosine-3'-phosphate N-[tris(GalNAc-alkyl)-amidodecanoyl)]-4-hydroxyprolinol Hyp-(GalNAc-alkyl)3 (2S,4R)-1-[29-[[2-(acetylamino)-2-deoxy-beta-D-galactopyran osyl]oxy]-14,14-bis[[3-[[3-[[5-[[2-(acetylamino)-2-deoxy-be ta-D-galactopyranosyl]oxy]-1-oxopentyl]amino]propyl]amino]- 3-oxopropoxy]methyl]-1,12,19,25-tetraoxo-16-oxa-13,20,24-tr iazanonacos-1-yl]-4-hydroxy-2-hydroxymethylpyrrolidine
gtgaacttacgtggtgattaa

SEQ ID NO: 908 - RNA, 21 nt, synthetic construct
  source 1..21: mol_type = other RNA
  modified_base 1: mod_base = OTHER; note = 2'-O-methylguanosine-3'- phosphorothioate
  modified_base 2: mod_base = OTHER; note = 2'-O-methyladenosine-3'- phosphorothioate
  modified_base 3: mod_base = OTHER; note = 2'-O-methyladenosine-3'-phosphate
  modified_base 4: mod_base = OTHER; note = 2'-O-methylcytidine-3'-phosphate
  modified_base 5: mod_base = OTHER; note = 2'-O-methyluridine-3'-phosphate
  modified_base 6: mod_base = OTHER; note = 2'-O-hexadecyl-uridine-3'-phosphate
  modified_base 7: mod_base = OTHER; note = 2'-fluoroadenosine-3'-phosphate
  modified_base 8: mod_base = OTHER; note = 2'-O-methylcytidine-3'-phosphate
  modified_base 9: mod_base = OTHER; note = 2'-fluoroguanosine-3'-phosphate
  modified_base 10: mod_base = OTHER; note = 2'-fluorouridine-3'-phosphate
  modified_base 11: mod_base = OTHER; note = 2'-fluoroguanosine-3'-phosphate
  modified_base 12: mod_base = OTHER; note = 2'-O-methylguanosine-3'-phosphate
  modified_base 13: mod_base = OTHER; note = 2'-O-methyluridine-3'-phosphate
  modified_base 14: mod_base = OTHER; note = 2'-O-methylguanosine-3'-phosphate
  modified_base 15: mod_base = OTHER; note = 2'-O-methyladenosine-3'-phosphate
  modified_base 16: mod_base = OTHER; note = 2'-O-methyluridine-3'-phosphate
  modified_base 17: mod_base = OTHER; note = 2'-O-methyluridine-3'-phosphate
  modified_base 18: mod_base = OTHER; note = 2'-O-methyladenosine-3'-phosphate
  modified_base 19: mod_base = OTHER; note = 2'-O-methyladenosine-3'-phosphate
  modified_base 20: mod_base = OTHER; note = 2'-O-methyluridine-3'-phosphate
  modified_base 21: mod_base = OTHER; note = 2'-O-methyladenosine-3'-phosphate N-[tris(GalNAc-alkyl)-amidodecanoyl)]-4-hydroxyprolinol Hyp-(GalNAc-alkyl)3 (2S,4R)-1-[29-[[2-(acetylamino)-2-deoxy-beta-D-galactopyran osyl]oxy]-14,14-bis[[3-[[3-[[5-[[2-(acetylamino)-2-deoxy-be ta-D-galactopyranosyl]oxy]-1-oxopentyl]amino]propyl]amino]- 3-oxopropoxy]methyl]-1,12,19,25-tetraoxo-16-oxa-13,20,24-tr iazanonacos-1-yl]-4-hydroxy-2-hydroxymethylpyrrolidine
gaacttacgtggtgattaata

SEQ ID NO: 909 - RNA, 21 nt, synthetic construct
  source 1..21: mol_type = other RNA
  modified_base 1: mod_base = OTHER; note = 2'-O-methylguanosine-3'- phosphorothioate
  modified_base 2: mod_base = OTHER; note = 2'-O-methyladenosine-3'- phosphorothioate
  modified_base 3: mod_base = OTHER; note = 2'-O-methyladenosine-3'-phosphate
  modified_base 4: mod_base = OTHER; note = 2'-O-methylcytidine-3'-phosphate
  modified_base 5: mod_base = OTHER; note = 2'-O-methyluridine-3'-phosphate
  modified_base 6: mod_base = OTHER; note = 2'-O-hexadecyl-uridine-3'-phosphate
  modified_base 7: mod_base = OTHER; note = 2'-O-methyladenosine-3'-phosphate
  modified_base 8: mod_base = OTHER; note = 2'-O-methylcytidine-3'-phosphate
  modified_base 9: mod_base = OTHER; note = 2'-fluoroguanosine-3'-phosphate
  modified_base 10: mod_base = OTHER; note = 2'-fluorouridine-3'-phosphate
  modified_base 11: mod_base = OTHER; note = 2'-fluoroguanosine-3'-phosphate
  modified_base 12: mod_base = OTHER; note = 2'-O-methylguanosine-3'-phosphate
  modified_base 13: mod_base = OTHER; note = 2'-O-methyluridine-3'-phosphate
  modified_base 14: mod_base = OTHER; note = 2'-O-methylguanosine-3'-phosphate
  modified_base 15: mod_base = OTHER; note = 2'-O-methyladenosine-3'-phosphate
  modified_base 16: mod_base = OTHER; note = 2'-O-methyluridine-3'-phosphate
  modified_base 17: mod_base = OTHER; note = 2'-O-methyluridine-3'-phosphate
  modified_base 18: mod_base = OTHER; note = 2'-O-methyladenosine-3'-phosphate
  modified_base 19: mod_base = OTHER; note = 2'-O-methyladenosine-3'-phosphate
  modified_base 20: mod_base = OTHER; note = 2'-O-methyluridine-3'-phosphate
  modified_base 21: mod_base = OTHER; note = 2'-O-methyladenosine-3'-phosphate N-[tris(GalNAc-alkyl)-amidodecanoyl)]-4-hydroxyprolinol Hyp-(GalNAc-alkyl)3 (2S,4R)-1-[29-[[2-(acetylamino)-2-deoxy-beta-D-galactopyran osyl]oxy]-14,14-bis[[3-[[3-[[5-[[2-(acetylamino)-2-deoxy-be ta-D-galactopyranosyl]oxy]-1-oxopentyl]amino]propyl]amino]- 3-oxopropoxy]methyl]-1,12,19,25-tetraoxo-16-oxa-13,20,24-tr iazanonacos-1-yl]-4-hydroxy-2-hydroxymethylpyrrolidine
gaacttacgtggtgattaata

SEQ ID NO: 910 - RNA, 21 nt, synthetic construct
  source 1..21: mol_type = other RNA
  modified_base 1: mod_base = OTHER; note = 2'-O-methyladenosine-3'- phosphorothioate
  modified_base 2: mod_base = OTHER; note = 2'-O-methyladenosine-3'- phosphorothioate
  modified_base 3: mod_base = OTHER; note = 2'-O-methylcytidine-3'-phosphate
  modified_base 4: mod_base = OTHER; note = 2'-O-methyluridine-3'-phosphate
  modified_base 5: mod_base = OTHER; note = 2'-O-methyluridine-3'-phosphate
  modified_base 6: mod_base = OTHER; note = 2'-O-hexadecyl-adenosine-3'-phosphate
  modified_base 7: mod_base = OTHER; note = 2'-fluorocytidine-3'-phosphate
  modified_base 8: mod_base = OTHER; note = 2'-O-methylguanosine-3'-phosphate
  modified_base 9: mod_base = OTHER; note = 2'-fluorouridine-3'-phosphate
  modified_base 10: mod_base = OTHER; note = 2'-fluoroguanosine-3'-phosphate
  modified_base 11: mod_base = OTHER; note = 2'-fluoroguanosine-3'-phosphate
  modified_base 12: mod_base = OTHER; note = 2'-O-methyluridine-3'-phosphate
  modified_base 13: mod_base = OTHER; note = 2'-O-methylguanosine-3'-phosphate
  modified_base 14: mod_base = OTHER; note = 2'-O-methyladenosine-3'-phosphate
  modified_base 15: mod_base = OTHER; note = 2'-O-methyluridine-3'-phosphate
  modified_base 16: mod_base = OTHER; note = 2'-O-methyluridine-3'-phosphate
  modified_base 17: mod_base = OTHER; note = 2'-O-methyladenosine-3'-phosphate
  modified_base 18: mod_base = OTHER; note = 2'-O-methyladenosine-3'-phosphate
  modified_base 19: mod_base = OTHER; note = 2'-O-methyluridine-3'-phosphate
  modified_base 20: mod_base = OTHER; note = 2'-O-methylguanosine-3'-phosphate
  modified_base 21: mod_base = OTHER; note = 2'-O-methyladenosine-3'-phosphate N-[tris(GalNAc-alkyl)-amidodecanoyl)]-4-hydroxyprolinol Hyp-(GalNAc-alkyl)3 (2S,4R)-1-[29-[[2-(acetylamino)-2-deoxy-beta-D-galactopyran osyl]oxy]-14,14-bis[[3-[[3-[[5-[[2-(acetylamino)-2-deoxy-be ta-D-galactopyranosyl]oxy]-1-oxopentyl]amino]propyl]amino]- 3-oxopropoxy]methyl]-1,12,19,25-tetraoxo-16-oxa-13,20,24-tr iazanonacos-1-yl]-4-hydroxy-2-hydroxymethylpyrrolidine
aacttacgtggtgattaatga

SEQ ID NO: 911 - RNA, 21 nt, synthetic construct
  source 1..21: mol_type = other RNA
  modified_base 1: mod_base = OTHER; note = 2'-O-methyladenosine-3'- phosphorothioate
  modified_base 2: mod_base = OTHER; note = 2'-O-methyladenosine-3'- phosphorothioate
  modified_base 3: mod_base = OTHER; note = 2'-O-methylcytidine-3'-phosphate
  modified_base 4: mod_base = OTHER; note = 2'-O-methyluridine-3'-phosphate
  modified_base 5: mod_base = OTHER; note = 2'-O-methyluridine-3'-phosphate
  modified_base 6: mod_base = OTHER; note = 2'-O-hexadecyl-adenosine-3'-phosphate
  modified_base 7: mod_base = OTHER; note = 2'-O-methylcytidine-3'-phosphate
  modified_base 8: mod_base = OTHER; note = 2'-O-methylguanosine-3'-phosphate
  modified_base 9: mod_base = OTHER; note = 2'-fluorouridine-3'-phosphate
  modified_base 10: mod_base = OTHER; note = 2'-fluoroguanosine-3'-phosphate
  modified_base 11: mod_base = OTHER; note = 2'-fluoroguanosine-3'-phosphate
  modified_base 12: mod_base = OTHER; note = 2'-O-methyluridine-3'-phosphate
  modified_base 13: mod_base = OTHER; note = 2'-O-methylguanosine-3'-phosphate
  modified_base 14: mod_base = OTHER; note = 2'-O-methyladenosine-3'-phosphate
  modified_base 15: mod_base = OTHER; note = 2'-O-methyluridine-3'-phosphate
  modified_base 16: mod_base = OTHER; note = 2'-O-methyluridine-3'-phosphate
  modified_base 17: mod_base = OTHER; note = 2'-O-methyladenosine-3'-phosphate
  modified_base 18: mod_base = OTHER; note = 2'-O-methyladenosine-3'-phosphate
  modified_base 19: mod_base = OTHER; note = 2'-O-methyluridine-3'-phosphate
  modified_base 20: mod_base = OTHER; note = 2'-O-methylguanosine-3'-phosphate
  modified_base 21: mod_base = OTHER; note = 2'-O-methyladenosine-3'-phosphate N-[tris(GalNAc-alkyl)-amidodecanoyl)]-4-hydroxyprolinol Hyp-(GalNAc-alkyl)3 (2S,4R)-1-[29-[[2-(acetylamino)-2-deoxy-beta-D-galactopyran osyl]oxy]-14,14-bis[[3-[[3-[[5-[[2-(acetylamino)-2-deoxy-be ta-D-galactopyranosyl]oxy]-1-oxopentyl]amino]propyl]amino]- 3-oxopropoxy]methyl]-1,12,19,25-tetraoxo-16-oxa-13,20,24-tr iazanonacos-1-yl]-4-hydroxy-2-hydroxymethylpyrrolidine
aacttacgtggtgattaatga

SEQ ID NO: 912 - RNA, 21 nt, synthetic construct
  source 1..21: mol_type = other RNA
  modified_base 1: mod_base = OTHER; note = 2'-O-methyladenosine-3'- phosphorothioate
  modified_base 2: mod_base = OTHER; note = 2'-O-methylcytidine-3'- phosphorothioate
  modified_base 3: mod_base = OTHER; note = 2'-O-methyluridine-3'-phosphate
  modified_base 4: mod_base = OTHER; note = 2'-O-methyluridine-3'-phosphate
  modified_base 5: mod_base = OTHER; note = 2'-O-methyladenosine-3'-phosphate
  modified_base 6: mod_base = OTHER; note = 2'-O-hexadecyl-cytidine-3'-phosphate
  modified_base 7: mod_base = OTHER; note = 2'-fluoroguanosine-3'-phosphate
  modified_base 8: mod_base = OTHER; note = 2'-O-methyluridine-3'-phosphate
  modified_base 9: mod_base = OTHER; note = 2'-fluoroguanosine-3'-phosphate
  modified_base 10: mod_base = OTHER; note = 2'-fluoroguanosine-3'-phosphate
  modified_base 11: mod_base = OTHER; note = 2'-fluorouridine-3'-phosphate
  modified_base 12: mod_base = OTHER; note = 2'-O-methylguanosine-3'-phosphate
  modified_base 13: mod_base = OTHER; note = 2'-O-methyladenosine-3'-phosphate
  modified_base 14: mod_base = OTHER; note = 2'-O-methyluridine-3'-phosphate
  modified_base 15: mod_base = OTHER; note = 2'-O-methyluridine-3'-phosphate
  modified_base 16: mod_base = OTHER; note = 2'-O-methyladenosine-3'-phosphate
  modified_base 17: mod_base = OTHER; note = 2'-O-methyladenosine-3'-phosphate
  modified_base 18: mod_base = OTHER; note = 2'-O-methyluridine-3'-phosphate
  modified_base 19: mod_base = OTHER; note = 2'-O-methylguanosine-3'-phosphate
  modified_base 20: mod_base = OTHER; note = 2'-O-methyladenosine-3'-phosphate
  modified_base 21: mod_base = OTHER; note = 2'-O-methyladenosine-3'-phosphate N-[tris(GalNAc-alkyl)-amidodecanoyl)]-4-hydroxyprolinol Hyp-(GalNAc-alkyl)3 (2S,4R)-1-[29-[[2-(acetylamino)-2-deoxy-beta-D-galactopyran osyl]oxy]-14,14-bis[[3-[[3-[[5-[[2-(acetylamino)-2-deoxy-be ta-D-galactopyranosyl]oxy]-1-oxopentyl]amino]propyl]amino]- 3-oxopropoxy]methyl]-1,12,19,25-tetraoxo-16-oxa-13,20,24-tr iazanonacos-1-yl]-4-hydroxy-2-hydroxymethylpyrrolidine
acttacgtggtgattaatgaa

SEQ ID NO: 913 - RNA, 21 nt, synthetic construct
  source 1..21: mol_type = other RNA
  modified_base 1: mod_base = OTHER; note = 2'-O-methyladenosine-3'- phosphorothioate
  modified_base 2: mod_base = OTHER; note = 2'-O-methylcytidine-3'- phosphorothioate
  modified_base 3: mod_base = OTHER; note = 2'-O-methyluridine-3'-phosphate
  modified_base 4: mod_base = OTHER; note = 2'-O-methyluridine-3'-phosphate
  modified_base 5: mod_base = OTHER; note = 2'-O-methyladenosine-3'-phosphate
  modified_base 6: mod_base = OTHER; note = 2'-O-hexadecyl-cytidine-3'-phosphate
  modified_base 7: mod_base = OTHER; note = 2'-O-methylguanosine-3'-phosphate
  modified_base 8: mod_base = OTHER; note = 2'-O-methyluridine-3'-phosphate
  modified_base 9: mod_base = OTHER; note = 2'-fluoroguanosine-3'-phosphate
  modified_base 10: mod_base = OTHER; note = 2'-fluoroguanosine-3'-phosphate
  modified_base 11: mod_base = OTHER; note = 2'-fluorouridine-3'-phosphate
  modified_base 12: mod_base = OTHER; note = 2'-O-methylguanosine-3'-phosphate
  modified_base 13: mod_base = OTHER; note = 2'-O-methyladenosine-3'-phosphate
  modified_base 14: mod_base = OTHER; note = 2'-O-methyluridine-3'-phosphate
  modified_base 15: mod_base = OTHER; note = 2'-O-methyluridine-3'-phosphate
  modified_base 16: mod_base = OTHER; note = 2'-O-methyladenosine-3'-phosphate
  modified_base 17: mod_base = OTHER; note = 2'-O-methyladenosine-3'-phosphate
  modified_base 18: mod_base = OTHER; note = 2'-O-methyluridine-3'-phosphate
  modified_base 19: mod_base = OTHER; note = 2'-O-methylguanosine-3'-phosphate
  modified_base 20: mod_base = OTHER; note = 2'-O-methyladenosine-3'-phosphate
  modified_base 21: mod_base = OTHER; note = 2'-O-methyladenosine-3'-phosphate N-[tris(GalNAc-alkyl)-amidodecanoyl)]-4-hydroxyprolinol Hyp-(GalNAc-alkyl)3 (2S,4R)-1-[29-[[2-(acetylamino)-2-deoxy-beta-D-galactopyran osyl]oxy]-14,14-bis[[3-[[3-[[5-[[2-(acetylamino)-2-deoxy-be ta-D-galactopyranosyl]oxy]-1-oxopentyl]amino]propyl]amino]- 3-oxopropoxy]methyl]-1,12,19,25-tetraoxo-16-oxa-13,20,24-tr iazanonacos-1-yl]-4-hydroxy-2-hydroxymethylpyrrolidine
acttacgtggtgattaatgaa

SEQ ID NO: 914 - RNA, 21 nt, synthetic construct
  source 1..21: mol_type = other RNA
  modified_base 1: mod_base = OTHER; note = 2'-O-methylcytidine-3'- phosphorothioate
  modified_base 2: mod_base = OTHER; note = 2'-O-methyluridine-3'-phosphorothioate
  modified_base 3: mod_base = OTHER; note = 2'-O-methyluridine-3'-phosphate
  modified_base 4: mod_base = OTHER; note = 2'-O-methyladenosine-3'-phosphate
  modified_base 5: mod_base = OTHER; note = 2'-O-methylcytidine-3'-phosphate
  modified_base 6: mod_base = OTHER; note = 2'-O-hexadecyl-guanosine-3'-phosphate
  modified_base 7: mod_base = OTHER; note = 2'-fluorouridine-3'-phosphate
  modified_base 8: mod_base = OTHER; note = 2'-O-methylguanosine-3'-phosphate
  modified_base 9: mod_base = OTHER; note = 2'-fluoroguanosine-3'-phosphate
  modified_base 10: mod_base = OTHER; note = 2'-fluorouridine-3'-phosphate
  modified_base 11: mod_base = OTHER; note = 2'-fluoroguanosine-3'-phosphate
  modified_base 12: mod_base = OTHER; note = 2'-O-methyladenosine-3'-phosphate
  modified_base 13: mod_base = OTHER; note = 2'-O-methyluridine-3'-phosphate
  modified_base 14: mod_base = OTHER; note = 2'-O-methyluridine-3'-phosphate
  modified_base 15: mod_base = OTHER; note = 2'-O-methyladenosine-3'-phosphate
  modified_base 16: mod_base = OTHER; note = 2'-O-methyladenosine-3'-phosphate
  modified_base 17: mod_base = OTHER; note = 2'-O-methyluridine-3'-phosphate
  modified_base 18: mod_base = OTHER; note = 2'-O-methylguanosine-3'-phosphate
  modified_base 19: mod_base = OTHER; note = 2'-O-methyladenosine-3'-phosphate
  modified_base 20: mod_base = OTHER; note = 2'-O-methyladenosine-3'-phosphate
  modified_base 21: mod_base = OTHER; note = 2'-O-methyladenosine-3'-phosphate N-[tris(GalNAc-alkyl)-amidodecanoyl)]-4-hydroxyprolinol Hyp-(GalNAc-alkyl)3 (2S,4R)-1-[29-[[2-(acetylamino)-2-deoxy-beta-D-galactopyran osyl]oxy]-14,14-bis[[3-[[3-[[5-[[2-(acetylamino)-2-deoxy-be ta-D-galactopyranosyl]oxy]-1-oxopentyl]amino]propyl]amino]- 3-oxopropoxy]methyl]-1,12,19,25-tetraoxo-16-oxa-13,20,24-tr iazanonacos-1-yl]-4-hydroxy-2-hydroxymethylpyrrolidine
cttacgtggtgattaatgaaa

SEQ ID NO: 915 - RNA, 21 nt, synthetic construct
  source 1..21: mol_type = other RNA
  modified_base 1: mod_base = OTHER; note = 2'-O-methylcytidine-3'- phosphorothioate
  modified_base 2: mod_base = OTHER; note = 2'-O-methyluridine-3'-phosphorothioate
  modified_base 3: mod_base = OTHER; note = 2'-O-methyluridine-3'-phosphate
  modified_base 4: mod_base = OTHER; note = 2'-O-methyladenosine-3'-phosphate
  modified_base 5: mod_base = OTHER; note = 2'-O-methylcytidine-3'-phosphate
  modified_base 6: mod_base = OTHER; note = 2'-O-hexadecyl-guanosine-3'-phosphate
  modified_base 7: mod_base = OTHER; note = 2'-O-methyluridine-3'-phosphate
  modified_base 8: mod_base = OTHER; note = 2'-O-methylguanosine-3'-phosphate
  modified_base 9: mod_base = OTHER; note = 2'-fluoroguanosine-3'-phosphate
  modified_base 10: mod_base = OTHER; note = 2'-fluorouridine-3'-phosphate
  modified_base 11: mod_base = OTHER; note = 2'-fluoroguanosine-3'-phosphate
  modified_base 12: mod_base = OTHER; note = 2'-O-methyladenosine-3'-phosphate
  modified_base 13: mod_base = OTHER; note = 2'-O-methyluridine-3'-phosphate
  modified_base 14: mod_base = OTHER; note = 2'-O-methyluridine-3'-phosphate
  modified_base 15: mod_base = OTHER; note = 2'-O-methyladenosine-3'-phosphate
  modified_base 16: mod_base = OTHER; note = 2'-O-methyladenosine-3'-phosphate
  modified_base 17: mod_base = OTHER; note = 2'-O-methyluridine-3'-phosphate
  modified_base 18: mod_base = OTHER; note = 2'-O-methylguanosine-3'-phosphate
  modified_base 19: mod_base = OTHER; note = 2'-O-methyladenosine-3'-phosphate
  modified_base 20: mod_base = OTHER; note = 2'-O-methyladenosine-3'-phosphate
  modified_base 21: mod_base = OTHER; note = 2'-O-methyladenosine-3'-phosphate N-[tris(GalNAc-alkyl)-amidodecanoyl)]-4-hydroxyprolinol Hyp-(GalNAc-alkyl)3 (2S,4R)-1-[29-[[2-(acetylamino)-2-deoxy-beta-D-galactopyran osyl]oxy]-14,14-bis[[3-[[3-[[5-[[2-(acetylamino)-2-deoxy-be ta-D-galactopyranosyl]oxy]-1-oxopentyl]amino]propyl]amino]- 3-oxopropoxy]methyl]-1,12,19,25-tetraoxo-16-oxa-13,20,24-tr iazanonacos-1-yl]-4-hydroxy-2-hydroxymethylpyrrolidine
cttacgtggtgattaatgaaa

SEQ ID NO: 916 - RNA, 21 nt, synthetic construct
  source 1..21: mol_type = other RNA
  modified_base 1: mod_base = OTHER; note = 2'-O-methyluridine-3'-phosphorothioate
  modified_base 2: mod_base = OTHER; note = 2'-O-methyluridine-3'-phosphorothioate
  modified_base 3: mod_base = OTHER; note = 2'-O-methyladenosine-3'-phosphate
  modified_base 4: mod_base = OTHER; note = 2'-O-methylcytidine-3'-phosphate
  modified_base 5: mod_base = OTHER; note = 2'-O-methylguanosine-3'-phosphate
  modified_base 6: mod_base = OTHER; note = 2'-O-hexadecyl-uridine-3'-phosphate
  modified_base 7: mod_base = OTHER; note = 2'-fluoroguanosine-3'-phosphate
  modified_base 8: mod_base = OTHER; note = 2'-O-methylguanosine-3'-phosphate
  modified_base 9: mod_base = OTHER; note = 2'-fluorouridine-3'-phosphate
  modified_base 10: mod_base = OTHER; note = 2'-fluoroguanosine-3'-phosphate
  modified_base 11: mod_base = OTHER; note = 2'-fluoroadenosine-3'-phosphate
  modified_base 12: mod_base = OTHER; note = 2'-O-methyluridine-3'-phosphate
  modified_base 13: mod_base = OTHER; note = 2'-O-methyluridine-3'-phosphate
  modified_base 14: mod_base = OTHER; note = 2'-O-methyladenosine-3'-phosphate
  modified_base 15: mod_base = OTHER; note = 2'-O-methyladenosine-3'-phosphate
  modified_base 16: mod_base = OTHER; note = 2'-O-methyluridine-3'-phosphate
  modified_base 17: mod_base = OTHER; note = 2'-O-methylguanosine-3'-phosphate
  modified_base 18: mod_base = OTHER; note = 2'-O-methyladenosine-3'-phosphate
  modified_base 19: mod_base = OTHER; note = 2'-O-methyladenosine-3'-phosphate
  modified_base 20: mod_base = OTHER; note = 2'-O-methyladenosine-3'-phosphate
  modified_base 21: mod_base = OTHER; note = 2'-O-methyladenosine-3'-phosphate N-[tris(GalNAc-alkyl)-amidodecanoyl)]-4-hydroxyprolinol Hyp-(GalNAc-alkyl)3 (2S,4R)-1-[29-[[2-(acetylamino)-2-deoxy-beta-D-galactopyran osyl]oxy]-14,14-bis[[3-[[3-[[5-[[2-(acetylamino)-2-deoxy-be ta-D-galactopyranosyl]oxy]-1-oxopentyl]amino]propyl]amino]- 3-oxopropoxy]methyl]-1,12,19,25-tetraoxo-16-oxa-13,20,24-tr iazanonacos-1-yl]-4-hydroxy-2-hydroxymethylpyrrolidine
ttacgtggtgattaatgaaaa

SEQ ID NO: 917 - RNA, 21 nt, synthetic construct
  source 1..21: mol_type = other RNA
  modified_base 1: mod_base = OTHER; note = 2'-O-methyluridine-3'-phosphorothioate
  modified_base 2: mod_base = OTHER; note = 2'-O-methyladenosine-3'- phosphorothioate
  modified_base 3: mod_base = OTHER; note = 2'-O-methylcytidine-3'-phosphate
  modified_base 4: mod_base = OTHER; note = 2'-O-methylguanosine-3'-phosphate
  modified_base 5: mod_base = OTHER; note = 2'-O-methyluridine-3'-phosphate
  modified_base 6: mod_base = OTHER; note = 2'-O-hexadecyl-guanosine-3'-phosphate
  modified_base 7: mod_base = OTHER; note = 2'-fluoroguanosine-3'-phosphate
  modified_base 8: mod_base = OTHER; note = 2'-O-methyluridine-3'-phosphate
  modified_base 9: mod_base = OTHER; note = 2'-fluoroguanosine-3'-phosphate
  modified_base 10: mod_base = OTHER; note = 2'-fluoroadenosine-3'-phosphate
  modified_base 11: mod_base = OTHER; note = 2'-fluorouridine-3'-phosphate
  modified_base 12: mod_base = OTHER; note = 2'-O-methyluridine-3'-phosphate
  modified_base 13: mod_base = OTHER; note = 2'-O-methyladenosine-3'-phosphate
  modified_base 14: mod_base = OTHER; note = 2'-O-methyladenosine-3'-phosphate
  modified_base 15: mod_base = OTHER; note = 2'-O-methyluridine-3'-phosphate
  modified_base 16: mod_base = OTHER; note = 2'-O-methylguanosine-3'-phosphate
  modified_base 17: mod_base = OTHER; note = 2'-O-methyladenosine-3'-phosphate
  modified_base 18: mod_base = OTHER; note = 2'-O-methyladenosine-3'-phosphate
  modified_base 19: mod_base = OTHER; note = 2'-O-methyladenosine-3'-phosphate
  modified_base 20: mod_base = OTHER; note = 2'-O-methyluridine-3'-phosphate
  modified_base 21: mod_base = OTHER; note = 2'-O-methyladenosine-3'-phosphate N-[tris(GalNAc-alkyl)-amidodecanoyl)]-4-hydroxyprolinol Hyp-(GalNAc-alkyl)3 (2S,4R)-1-[29-[[2-(acetylamino)-2-deoxy-beta-D-galactopyran osyl]oxy]-14,14-bis[[3-[[3-[[5-[[2-(acetylamino)-2-deoxy-be ta-D-galactopyranosyl]oxy]-1-oxopentyl]amino]propyl]amino]- 3-oxopropoxy]methyl]-1,12,19,25-tetraoxo-16-oxa-13,20,24-tr iazanonacos-1-yl]-4-hydroxy-2-hydroxymethylpyrrolidine
tacgtggtgattaatgaaata

SEQ ID NO: 918 - RNA, 21 nt, synthetic construct
  source 1..21: mol_type = other RNA
  modified_base 1: mod_base = OTHER; note = 2'-O-methyluridine-3'-phosphorothioate
  modified_base 2: mod_base = OTHER; note = 2'-O-methylguanosine-3'- phosphorothioate
  modified_base 3: mod_base = OTHER; note = 2'-O-methylguanosine-3'-phosphate
  modified_base 4: mod_base = OTHER; note = 2'-O-methyluridine-3'-phosphate
  modified_base 5: mod_base = OTHER; note = 2'-O-methylguanosine-3'-phosphate
  modified_base 6: mod_base = OTHER; note = 2'-O-hexadecyl-adenosine-3'-phosphate
  modified_base 7: mod_base = OTHER; note = 2'-fluorouridine-3'-phosphate
  modified_base 8: mod_base = OTHER; note = 2'-O-methyluridine-3'-phosphate
  modified_base 9: mod_base = OTHER; note = 2'-fluoroadenosine-3'-phosphate
  modified_base 10: mod_base = OTHER; note = 2'-fluoroadenosine-3'-phosphate
  modified_base 11: mod_base = OTHER; note = 2'-fluorouridine-3'-phosphate
  modified_base 12: mod_base = OTHER; note = 2'-O-methylguanosine-3'-phosphate
  modified_base 13: mod_base = OTHER; note = 2'-O-methyladenosine-3'-phosphate
  modified_base 14: mod_base = OTHER; note = 2'-O-methyladenosine-3'-phosphate
  modified_base 15: mod_base = OTHER; note = 2'-O-methyladenosine-3'-phosphate
  modified_base 16: mod_base = OTHER; note = 2'-O-methyluridine-3'-phosphate
  modified_base 17: mod_base = OTHER; note = 2'-O-methyluridine-3'-phosphate
  modified_base 18: mod_base = OTHER; note = 2'-O-methyladenosine-3'-phosphate
  modified_base 19: mod_base = OTHER; note = 2'-O-methyluridine-3'-phosphate
  modified_base 20: mod_base = OTHER; note = 2'-O-methylcytidine-3'-phosphate
  modified_base 21: mod_base = OTHER; note = 2'-O-methyladenosine-3'-phosphate N-[tris(GalNAc-alkyl)-amidodecanoyl)]-4-hydroxyprolinol Hyp-(GalNAc-alkyl)3 (2S,4R)-1-[29-[[2-(acetylamino)-2-deoxy-beta-D-galactopyran osyl]oxy]-14,14-bis[[3-[[3-[[5-[[2-(acetylamino)-2-deoxy-be ta-D-galactopyranosyl]oxy]-1-oxopentyl]amino]propyl]amino]- 3-oxopropoxy]methyl]-1,12,19,25-tetraoxo-16-oxa-13,20,24-tr iazanonacos-1-yl]-4-hydroxy-2-hydroxymethylpyrrolidine
tggtgattaatgaaattatca

SEQ ID NO: 919 - RNA, 21 nt, synthetic construct
  source 1..21: mol_type = other RNA
  modified_base 1: mod_base = OTHER; note = 2'-O-methyluridine-3'-phosphorothioate
  modified_base 2: mod_base = OTHER; note = 2'-O-methylguanosine-3'- phosphorothioate
  modified_base 3: mod_base = OTHER; note = 2'-O-methylguanosine-3'-phosphate
  modified_base 4: mod_base = OTHER; note = 2'-O-methyluridine-3'-phosphate
  modified_base 5: mod_base = OTHER; note = 2'-O-methylguanosine-3'-phosphate
  modified_base 6: mod_base = OTHER; note = 2'-O-hexadecyl-adenosine-3'-phosphate
  modified_base 7: mod_base = OTHER; note = 2'-O-methyluridine-3'-phosphate
  modified_base 8: mod_base = OTHER; note = 2'-O-methyluridine-3'-phosphate
  modified_base 9: mod_base = OTHER; note = 2'-fluoroadenosine-3'-phosphate
  modified_base 10: mod_base = OTHER; note = 2'-fluoroadenosine-3'-phosphate
  modified_base 11: mod_base = OTHER; note = 2'-fluorouridine-3'-phosphate
  modified_base 12: mod_base = OTHER; note = 2'-O-methylguanosine-3'-phosphate
  modified_base 13: mod_base = OTHER; note = 2'-O-methyladenosine-3'-phosphate
  modified_base 14: mod_base = OTHER; note = 2'-O-methyladenosine-3'-phosphate
  modified_base 15: mod_base = OTHER; note = 2'-O-methyladenosine-3'-phosphate
  modified_base 16: mod_base = OTHER; note = 2'-O-methyluridine-3'-phosphate
  modified_base 17: mod_base = OTHER; note = 2'-O-methyluridine-3'-phosphate
  modified_base 18: mod_base = OTHER; note = 2'-O-methyladenosine-3'-phosphate
  modified_base 19: mod_base = OTHER; note = 2'-O-methyluridine-3'-phosphate
  modified_base 20: mod_base = OTHER; note = 2'-O-methylcytidine-3'-phosphate
  modified_base 21: mod_base = OTHER; note = 2'-O-methyladenosine-3'-phosphate N-[tris(GalNAc-alkyl)-amidodecanoyl)]-4-hydroxyprolinol Hyp-(GalNAc-alkyl)3 (2S,4R)-1-[29-[[2-(acetylamino)-2-deoxy-beta-D-galactopyran osyl]oxy]-14,14-bis[[3-[[3-[[5-[[2-(acetylamino)-2-deoxy-be ta-D-galactopyranosyl]oxy]-1-oxopentyl]amino]propyl]amino]- 3-oxopropoxy]methyl]-1,12,19,25-tetraoxo-16-oxa-13,20,24-tr iazanonacos-1-yl]-4-hydroxy-2-hydroxymethylpyrrolidine
tggtgattaatgaaattatca

SEQ ID NO: 920 - RNA, 21 nt, synthetic construct
  source 1..21: mol_type = other RNA
  modified_base 1: mod_base = OTHER; note = 2'-O-methyladenosine-3'- phosphorothioate
  modified_base 2: mod_base = OTHER; note = 2'-O-methylguanosine-3'- phosphorothioate
  modified_base 3: mod_base = OTHER; note = 2'-O-methyluridine-3'-phosphate
  modified_base 4: mod_base = OTHER; note = 2'-O-methyluridine-3'-phosphate
  modified_base 5: mod_base = OTHER; note = 2'-O-methyluridine-3'-phosphate
  modified_base 6: mod_base = OTHER; note = 2'-O-hexadecyl-guanosine-3'-phosphate
  modified_base 7: mod_base = OTHER; note = 2'-fluoroguanosine-3'-phosphate
  modified_base 8: mod_base = OTHER; note = 2'-O-methylguanosine-3'-phosphate
  modified_base 9: mod_base = OTHER; note = 2'-fluorocytidine-3'-phosphate
  modified_base 10: mod_base = OTHER; note = 2'-fluorocytidine-3'-phosphate
  modified_base 11: mod_base = OTHER; note = 2'-fluorocytidine-3'-phosphate
  modified_base 12: mod_base = OTHER; note = 2'-O-methylguanosine-3'-phosphate
  modified_base 13: mod_base = OTHER; note = 2'-O-methylcytidine-3'-phosphate
  modified_base 14: mod_base = OTHER; note = 2'-O-methyluridine-3'-phosphate
  modified_base 15: mod_base = OTHER; note = 2'-O-methylguanosine-3'-phosphate
  modified_base 16: mod_base = OTHER; note = 2'-O-methylcytidine-3'-phosphate
  modified_base 17: mod_base = OTHER; note = 2'-O-methyladenosine-3'-phosphate
  modified_base 18: mod_base = OTHER; note = 2'-O-methylguanosine-3'-phosphate
  modified_base 19: mod_base = OTHER; note = 2'-O-methylcytidine-3'-phosphate
  modified_base 20: mod_base = OTHER; note = 2'-O-methyluridine-3'-phosphate
  modified_base 21: mod_base = OTHER; note = 2'-O-methyladenosine-3'-phosphate N-[tris(GalNAc-alkyl)-amidodecanoyl)]-4-hydroxyprolinol Hyp-(GalNAc-alkyl)3 (2S,4R)-1-[29-[[2-(acetylamino)-2-deoxy-beta-D-galactopyran osyl]oxy]-14,14-bis[[3-[[3-[[5-[[2-(acetylamino)-2-deoxy-be ta-D-galactopyranosyl]oxy]-1-oxopentyl]amino]propyl]amino]- 3-oxopropoxy]methyl]-1,12,19,25-tetraoxo-16-oxa-13,20,24-tr iazanonacos-1-yl]-4-hydroxy-2-hydroxymethylpyrrolidine
agtttgggcccgctgcagcta

SEQ ID NO: 921 - RNA, 21 nt, synthetic construct
  source 1..21: mol_type = other RNA
  modified_base 1: mod_base = OTHER; note = 2'-O-methyluridine-3'-phosphorothioate
  modified_base 2: mod_base = OTHER; note = 2'-O-methylguanosine-3'- phosphorothioate
  modified_base 3: mod_base = OTHER; note = 2'-O-methylguanosine-3'-phosphate
  modified_base 4: mod_base = OTHER; note = 2'-O-methylcytidine-3'-phosphate
  modified_base 5: mod_base = OTHER; note = 2'-O-methylguanosine-3'-phosphate
  modified_base 6: mod_base = OTHER; note = 2'-O-hexadecyl-guanosine-3'-phosphate
  modified_base 7: mod_base = OTHER; note = 2'-fluorouridine-3'-phosphate
  modified_base 8: mod_base = OTHER; note = 2'-O-methyladenosine-3'-phosphate
  modified_base 9: mod_base = OTHER; note = 2'-fluoroadenosine-3'-phosphate
  modified_base 10: mod_base = OTHER; note = 2'-fluorocytidine-3'-phosphate
  modified_base 11: mod_base = OTHER; note = 2'-fluorocytidine-3'-phosphate
  modified_base 12: mod_base = OTHER; note = 2'-O-methylcytidine-3'-phosphate
  modified_base 13: mod_base = OTHER; note = 2'-O-methyluridine-3'-phosphate
  modified_base 14: mod_base = OTHER; note = 2'-O-methylguanosine-3'-phosphate
  modified_base 15: mod_base = OTHER; note = 2'-O-methylcytidine-3'-phosphate
  modified_base 16: mod_base = OTHER; note = 2'-O-methyladenosine-3'-phosphate
  modified_base 17: mod_base = OTHER; note = 2'-O-methylguanosine-3'-phosphate
  modified_base 18: mod_base = OTHER; note = 2'-O-methylcytidine-3'-phosphate
  modified_base 19: mod_base = OTHER; note = 2'-O-methylcytidine-3'-phosphate
  modified_base 20: mod_base = OTHER; note = 2'-O-methyluridine-3'-phosphate
  modified_base 21: mod_base = OTHER; note = 2'-O-methyladenosine-3'-phosphate N-[tris(GalNAc-alkyl)-amidodecanoyl)]-4-hydroxyprolinol Hyp-(GalNAc-alkyl)3 (2S,4R)-1-[29-[[2-(acetylamino)-2-deoxy-beta-D-galactopyran osyl]oxy]-14,14-bis[[3-[[3-[[5-[[2-(acetylamino)-2-deoxy-be ta-D-galactopyranosyl]oxy]-1-oxopentyl]amino]propyl]amino]- 3-oxopropoxy]methyl]-1,12,19,25-tetraoxo-16-oxa-13,20,24-tr iazanonacos-1-yl]-4-hydroxy-2-hydroxymethylpyrrolidine
tggcggtaaccctgcagccta

SEQ ID NO: 922 - RNA, 21 nt, synthetic construct
  source 1..21: mol_type = other RNA
  modified_base 1: mod_base = OTHER; note = 2'-O-methylcytidine-3'- phosphorothioate
  modified_base 2: mod_base = OTHER; note = 2'-O-methyladenosine-3'- phosphorothioate
  modified_base 3: mod_base = OTHER; note = 2'-O-methylguanosine-3'-phosphate
  modified_base 4: mod_base = OTHER; note = 2'-O-methyladenosine-3'-phosphate
  modified_base 5: mod_base = OTHER; note = 2'-O-methylguanosine-3'-phosphate
  modified_base 6: mod_base = OTHER; note = 2'-O-hexadecyl-adenosine-3'-phosphate
  modified_base 7: mod_base = OTHER; note = 2'-fluorocytidine-3'-phosphate
  modified_base 8: mod_base = OTHER; note = 2'-O-methyladenosine-3'-phosphate
  modified_base 9: mod_base = OTHER; note = 2'-fluoroguanosine-3'-phosphate
  modified_base 10: mod_base = OTHER; note = 2'-fluoroadenosine-3'-phosphate
  modified_base 11: mod_base = OTHER; note = 2'-fluoroguanosine-3'-phosphate
  modified_base 12: mod_base = OTHER; note = 2'-O-methyluridine-3'-phosphate
  modified_base 13: mod_base = OTHER; note = 2'-O-methylguanosine-3'-phosphate
  modified_base 14: mod_base = OTHER; note = 2'-O-methyladenosine-3'-phosphate
  modified_base 15: mod_base = OTHER; note = 2'-O-methylcytidine-3'-phosphate
  modified_base 16: mod_base = OTHER; note = 2'-O-methylcytidine-3'-phosphate
  modified_base 17: mod_base = OTHER; note = 2'-O-methylcytidine-3'-phosphate
  modified_base 18: mod_base = OTHER; note = 2'-O-methyladenosine-3'-phosphate
  modified_base 19: mod_base = OTHER; note = 2'-O-methylguanosine-3'-phosphate
  modified_base 20: mod_base = OTHER; note = 2'-O-methylcytidine-3'-phosphate
  modified_base 21: mod_base = OTHER; note = 2'-O-methyladenosine-3'-phosphate N-[tris(GalNAc-alkyl)-amidodecanoyl)]-4-hydroxyprolinol Hyp-(GalNAc-alkyl)3 (2S,4R)-1-[29-[[2-(acetylamino)-2-deoxy-beta-D-galactopyran osyl]oxy]-14,14-bis[[3-[[3-[[5-[[2-(acetylamino)-2-deoxy-be ta-D-galactopyranosyl]oxy]-1-oxopentyl]amino]propyl]amino]- 3-oxopropoxy]methyl]-1,12,19,25-tetraoxo-16-oxa-13,20,24-tr iazanonacos-1-yl]-4-hydroxy-2-hydroxymethylpyrrolidine
cagagacagagtgacccagca

SEQ ID NO: 923 - RNA, 21 nt, synthetic construct
  source 1..21: mol_type = other RNA
  modified_base 1: mod_base = OTHER; note = 2'-O-methyladenosine-3'- phosphorothioate
  modified_base 2: mod_base = OTHER; note = 2'-O-methylguanosine-3'- phosphorothioate
  modified_base 3: mod_base = OTHER; note = 2'-O-methyladenosine-3'-phosphate
  modified_base 4: mod_base = OTHER; note = 2'-O-methylguanosine-3'-phosphate
  modified_base 5: mod_base = OTHER; note = 2'-O-methyladenosine-3'-phosphate
  modified_base 6: mod_base = OTHER; note = 2'-O-hexadecyl-cytidine-3'-phosphate
  modified_base 7: mod_base = OTHER; note = 2'-fluoroadenosine-3'-phosphate
  modified_base 8: mod_base = OTHER; note = 2'-O-methylguanosine-3'-phosphate
  modified_base 9: mod_base = OTHER; note = 2'-fluoroadenosine-3'-phosphate
  modified_base 10: mod_base = OTHER; note = 2'-fluoroguanosine-3'-phosphate
  modified_base 11: mod_base = OTHER; note = 2'-fluorouridine-3'-phosphate
  modified_base 12: mod_base = OTHER; note = 2'-O-methylguanosine-3'-phosphate
  modified_base 13: mod_base = OTHER; note = 2'-O-methyladenosine-3'-phosphate
  modified_base 14: mod_base = OTHER; note = 2'-O-methylcytidine-3'-phosphate
  modified_base 15: mod_base = OTHER; note = 2'-O-methylcytidine-3'-phosphate
  modified_base 16: mod_base = OTHER; note = 2'-O-methylcytidine-3'-phosphate
  modified_base 17: mod_base = OTHER; note = 2'-O-methyladenosine-3'-phosphate
  modified_base 18: mod_base = OTHER; note = 2'-O-methylguanosine-3'-phosphate
  modified_base 19: mod_base = OTHER; note = 2'-O-methylcytidine-3'-phosphate
  modified_base 20: mod_base = OTHER; note = 2'-O-methyladenosine-3'-phosphate
  modified_base 21: mod_base = OTHER; note = 2'-O-methyladenosine-3'-phosphate N-[tris(GalNAc-alkyl)-amidodecanoyl)]-4-hydroxyprolinol Hyp-(GalNAc-alkyl)3 (2S,4R)-1-[29-[[2-(acetylamino)-2-deoxy-beta-D-galactopyran osyl]oxy]-14,14-bis[[3-[[3-[[5-[[2-(acetylamino)-2-deoxy-be ta-D-galactopyranosyl]oxy]-1-oxopentyl]amino]propyl]amino]- 3-oxopropoxy]methyl]-1,12,19,25-tetraoxo-16-oxa-13,20,24-tr iazanonacos-1-yl]-4-hydroxy-2-hydroxymethylpyrrolidine
agagacagagtgacccagcaa

SEQ ID NO: 924 - RNA, 21 nt, synthetic construct
  source 1..21: mol_type = other RNA
  modified_base 1: mod_base = OTHER; note = 2'-O-methylguanosine-3'- phosphorothioate
  modified_base 2: mod_base = OTHER; note = 2'-O-methyladenosine-3'- phosphorothioate
  modified_base 3: mod_base = OTHER; note = 2'-O-methylguanosine-3'-phosphate
  modified_base 4: mod_base = OTHER; note = 2'-O-methyladenosine-3'-phosphate
  modified_base 5: mod_base = OTHER; note = 2'-O-methylcytidine-3'-phosphate
  modified_base 6: mod_base = OTHER; note = 2'-O-hexadecyl-adenosine-3'-phosphate
  modified_base 7: mod_base = OTHER; note = 2'-fluoroguanosine-3'-phosphate
  modified_base 8: mod_base = OTHER; note = 2'-O-methyladenosine-3'-phosphate
  modified_base 9: mod_base = OTHER; note = 2'-fluoroguanosine-3'-phosphate
  modified_base 10: mod_base = OTHER; note = 2'-fluorouridine-3'-phosphate
  modified_base 11: mod_base = OTHER; note = 2'-fluoroguanosine-3'-phosphate
  modified_base 12: mod_base = OTHER; note = 2'-O-methyladenosine-3'-phosphate
  modified_base 13: mod_base = OTHER; note = 2'-O-methylcytidine-3'-phosphate
  modified_base 14: mod_base = OTHER; note = 2'-O-methylcytidine-3'-phosphate
  modified_base 15: mod_base = OTHER; note = 2'-O-methylcytidine-3'-phosphate
  modified_base 16: mod_base = OTHER; note = 2'-O-methyladenosine-3'-phosphate
  modified_base 17: mod_base = OTHER; note = 2'-O-methylguanosine-3'-phosphate
  modified_base 18: mod_base = OTHER; note = 2'-O-methylcytidine-3'-phosphate
  modified_base 19: mod_base = OTHER; note = 2'-O-methyladenosine-3'-phosphate
  modified_base 20: mod_base = OTHER; note = 2'-O-methyladenosine-3'-phosphate
  modified_base 21: mod_base = OTHER; note = 2'-O-methyladenosine-3'-phosphate N-[tris(GalNAc-alkyl)-amidodecanoyl)]-4-hydroxyprolinol Hyp-(GalNAc-alkyl)3 (2S,4R)-1-[29-[[2-(acetylamino)-2-deoxy-beta-D-galactopyran osyl]oxy]-14,14-bis[[3-[[3-[[5-[[2-(acetylamino)-2-deoxy-be ta-D-galactopyranosyl]oxy]-1-oxopentyl]amino]propyl]amino]- 3-oxopropoxy]methyl]-1,12,19,25-tetraoxo-16-oxa-13,20,24-tr iazanonacos-1-yl]-4-hydroxy-2-hydroxymethylpyrrolidine
gagacagagtgacccagcaaa

SEQ ID NO: 925 - RNA, 21 nt, synthetic construct
  source 1..21: mol_type = other RNA
  modified_base 1: mod_base = OTHER; note = 2'-O-methylguanosine-3'- phosphorothioate
  modified_base 2: mod_base = OTHER; note = 2'-O-methyladenosine-3'- phosphorothioate
  modified_base 3: mod_base = OTHER; note = 2'-O-methylcytidine-3'-phosphate
  modified_base 4: mod_base = OTHER; note = 2'-O-methyladenosine-3'-phosphate
  modified_base 5: mod_base = OTHER; note = 2'-O-methylguanosine-3'-phosphate
  modified_base 6: mod_base = OTHER; note = 2'-O-hexadecyl-adenosine-3'-phosphate
  modified_base 7: mod_base = OTHER; note = 2'-fluoroguanosine-3'-phosphate
  modified_base 8: mod_base = OTHER; note = 2'-O-methyluridine-3'-phosphate
  modified_base 9: mod_base = OTHER; note = 2'-fluoroguanosine-3'-phosphate
  modified_base 10: mod_base = OTHER; note = 2'-fluoroadenosine-3'-phosphate
  modified_base 11: mod_base = OTHER; note = 2'-fluorocytidine-3'-phosphate
  modified_base 12: mod_base = OTHER; note = 2'-O-methylcytidine-3'-phosphate
  modified_base 13: mod_base = OTHER; note = 2'-O-methylcytidine-3'-phosphate
  modified_base 14: mod_base = OTHER; note = 2'-O-methyladenosine-3'-phosphate
  modified_base 15: mod_base = OTHER; note = 2'-O-methylguanosine-3'-phosphate
  modified_base 16: mod_base = OTHER; note = 2'-O-methylcytidine-3'-phosphate
  modified_base 17: mod_base = OTHER; note = 2'-O-methyladenosine-3'-phosphate
  modified_base 18: mod_base = OTHER; note = 2'-O-methyladenosine-3'-phosphate
  modified_base 19: mod_base = OTHER; note = 2'-O-methylcytidine-3'-phosphate
  modified_base 20: mod_base = OTHER; note = 2'-O-methylcytidine-3'-phosphate
  modified_base 21: mod_base = OTHER; note = 2'-O-methyladenosine-3'-phosphate N-[tris(GalNAc-alkyl)-amidodecanoyl)]-4-hydroxyprolinol Hyp-(GalNAc-alkyl)3 (2S,4R)-1-[29-[[2-(acetylamino)-2-deoxy-beta-D-galactopyran osyl]oxy]-14,14-bis[[3-[[3-[[5-[[2-(acetylamino)-2-deoxy-be ta-D-galactopyranosyl]oxy]-1-oxopentyl]amino]propyl]amino]- 3-oxopropoxy]methyl]-1,12,19,25-tetraoxo-16-oxa-13,20,24-tr iazanonacos-1-yl]-4-hydroxy-2-hydroxymethylpyrrolidine
gacagagtgacccagcaacca

SEQ ID NO: 926 - RNA, 21 nt, synthetic construct
  source 1..21: mol_type = other RNA
  modified_base 1: mod_base = OTHER; note = 2'-O-methyladenosine-3'- phosphorothioate
  modified_base 2: mod_base = OTHER; note = 2'-O-methylcytidine-3'- phosphorothioate
  modified_base 3: mod_base = OTHER; note = 2'-O-methyladenosine-3'-phosphate
  modified_base 4: mod_base = OTHER; note = 2'-O-methylguanosine-3'-phosphate
  modified_base 5: mod_base = OTHER; note = 2'-O-methyladenosine-3'-phosphate
  modified_base 6: mod_base = OTHER; note = 2'-O-hexadecyl-guanosine-3'-phosphate
  modified_base 7: mod_base = OTHER; note = 2'-fluorouridine-3'-phosphate
  modified_base 8: mod_base = OTHER; note = 2'-O-methylguanosine-3'-phosphate
  modified_base 9: mod_base = OTHER; note = 2'-fluoroadenosine-3'-phosphate
  modified_base 10: mod_base = OTHER; note = 2'-fluorocytidine-3'-phosphate
  modified_base 11: mod_base = OTHER; note = 2'-fluorocytidine-3'-phosphate
  modified_base 12: mod_base = OTHER; note = 2'-O-methylcytidine-3'-phosphate
  modified_base 13: mod_base = OTHER; note = 2'-O-methyladenosine-3'-phosphate
  modified_base 14: mod_base = OTHER; note = 2'-O-methylguanosine-3'-phosphate
  modified_base 15: mod_base = OTHER; note = 2'-O-methylcytidine-3'-phosphate
  modified_base 16: mod_base = OTHER; note = 2'-O-methyladenosine-3'-phosphate
  modified_base 17: mod_base = OTHER; note = 2'-O-methyladenosine-3'-phosphate
  modified_base 18: mod_base = OTHER; note = 2'-O-methylcytidine-3'-phosphate
  modified_base 19: mod_base = OTHER; note = 2'-O-methylcytidine-3'-phosphate
  modified_base 20: mod_base = OTHER; note = 2'-O-methylcytidine-3'-phosphate
  modified_base 21: mod_base = OTHER; note = 2'-O-methyladenosine-3'-phosphate N-[tris(GalNAc-alkyl)-amidodecanoyl)]-4-hydroxyprolinol Hyp-(GalNAc-alkyl)3 (2S,4R)-1-[29-[[2-(acetylamino)-2-deoxy-beta-D-galactopyran osyl]oxy]-14,14-bis[[3-[[3-[[5-[[2-(acetylamino)-2-deoxy-be ta-D-galactopyranosyl]oxy]-1-oxopentyl]amino]propyl]amino]- 3-oxopropoxy]methyl]-1,12,19,25-tetraoxo-16-oxa-13,20,24-tr iazanonacos-1-yl]-4-hydroxy-2-hydroxymethylpyrrolidine
acagagtgacccagcaaccca

SEQ ID NO: 927 - RNA, 21 nt, synthetic construct
  source 1..21: mol_type = other RNA
  modified_base 1: mod_base = OTHER; note = 2'-O-methylguanosine-3'- phosphorothioate
  modified_base 2: mod_base = OTHER; note = 2'-O-methyladenosine-3'- phosphorothioate
  modified_base 3: mod_base = OTHER; note = 2'-O-methylguanosine-3'-phosphate
  modified_base 4: mod_base = OTHER; note = 2'-O-methyluridine-3'-phosphate
  modified_base 5: mod_base = OTHER; note = 2'-O-methylguanosine-3'-phosphate
  modified_base 6: mod_base = OTHER; note = 2'-O-hexadecyl-adenosine-3'-phosphate
  modified_base 7: mod_base = OTHER; note = 2'-fluorocytidine-3'-phosphate
  modified_base 8: mod_base = OTHER; note = 2'-O-methylcytidine-3'-phosphate
  modified_base 9: mod_base = OTHER; note = 2'-fluorocytidine-3'-phosphate
  modified_base 10: mod_base = OTHER; note = 2'-fluoroadenosine-3'-phosphate
  modified_base 11: mod_base = OTHER; note = 2'-fluoroguanosine-3'-phosphate
  modified_base 12: mod_base = OTHER; note = 2'-O-methylcytidine-3'-phosphate
  modified_base 13: mod_base = OTHER; note = 2'-O-methyladenosine-3'-phosphate
  modified_base 14: mod_base = OTHER; note = 2'-O-methyladenosine-3'-phosphate
  modified_base 15: mod_base = OTHER; note = 2'-O-methylcytidine-3'-phosphate
  modified_base 16: mod_base = OTHER; note = 2'-O-methylcytidine-3'-phosphate
  modified_base 17: mod_base = OTHER; note = 2'-O-methylcytidine-3'-phosphate
  modified_base 18: mod_base = OTHER; note = 2'-O-methyladenosine-3'-phosphate
  modified_base 19: mod_base = OTHER; note = 2'-O-methylguanosine-3'-phosphate
  modified_base 20: mod_base = OTHER; note = 2'-O-methyladenosine-3'-phosphate
  modified_base 21: mod_base = OTHER; note = 2'-O-methyladenosine-3'-phosphate N-[tris(GalNAc-alkyl)-amidodecanoyl)]-4-hydroxyprolinol Hyp-(GalNAc-alkyl)3 (2S,4R)-1-[29-[[2-(acetylamino)-2-deoxy-beta-D-galactopyran osyl]oxy]-14,14-bis[[3-[[3-[[5-[[2-(acetylamino)-2-deoxy-be ta-D-galactopyranosyl]oxy]-1-oxopentyl]amino]propyl]amino]- 3-oxopropoxy]methyl]-1,12,19,25-tetraoxo-16-oxa-13,20,24-tr iazanonacos-1-yl]-4-hydroxy-2-hydroxymethylpyrrolidine
gagtgacccagcaacccagaa

SEQ ID NO: 928 - RNA, 21 nt, synthetic construct
  source 1..21: mol_type = other RNA
  modified_base 1: mod_base = OTHER; note = 2'-O-methyladenosine-3'- phosphorothioate
  modified_base 2: mod_base = OTHER; note = 2'-O-methylguanosine-3'- phosphorothioate
  modified_base 3: mod_base = OTHER; note = 2'-O-methyluridine-3'-phosphate
  modified_base 4: mod_base = OTHER; note = 2'-O-methylguanosine-3'-phosphate
  modified_base 5: mod_base = OTHER; note = 2'-O-methyladenosine-3'-phosphate
  modified_base 6: mod_base = OTHER; note = 2'-O-hexadecyl-cytidine-3'-phosphate
  modified_base 7: mod_base = OTHER; note = 2'-fluorocytidine-3'-phosphate
  modified_base 8: mod_base = OTHER; note = 2'-O-methylcytidine-3'-phosphate
  modified_base 9: mod_base = OTHER; note = 2'-fluoroadenosine-3'-phosphate
  modified_base 10: mod_base = OTHER; note = 2'-fluoroguanosine-3'-phosphate
  modified_base 11: mod_base = OTHER; note = 2'-fluorocytidine-3'-phosphate
  modified_base 12: mod_base = OTHER; note = 2'-O-methyladenosine-3'-phosphate
  modified_base 13: mod_base = OTHER; note = 2'-O-methyladenosine-3'-phosphate
  modified_base 14: mod_base = OTHER; note = 2'-O-methylcytidine-3'-phosphate
  modified_base 15: mod_base = OTHER; note = 2'-O-methylcytidine-3'-phosphate
  modified_base 16: mod_base = OTHER; note = 2'-O-methylcytidine-3'-phosphate
  modified_base 17: mod_base = OTHER; note = 2'-O-methyladenosine-3'-phosphate
  modified_base 18: mod_base = OTHER; note = 2'-O-methylguanosine-3'-phosphate
  modified_base 19: mod_base = OTHER; note = 2'-O-methyladenosine-3'-phosphate
  modified_base 20: mod_base = OTHER; note = 2'-O-methylguanosine-3'-phosphate
  modified_base 21: mod_base = OTHER; note = 2'-O-methyladenosine-3'-phosphate N-[tris(GalNAc-alkyl)-amidodecanoyl)]-4-hydroxyprolinol Hyp-(GalNAc-alkyl)3 (2S,4R)-1-[29-[[2-(acetylamino)-2-deoxy-beta-D-galactopyran osyl]oxy]-14,14-bis[[3-[[3-[[5-[[2-(acetylamino)-2-deoxy-be ta-D-galactopyranosyl]oxy]-1-oxopentyl]amino]propyl]amino]- 3-oxopropoxy]methyl]-1,12,19,25-tetraoxo-16-oxa-13,20,24-tr iazanonacos-1-yl]-4-hydroxy-2-hydroxymethylpyrrolidine
agtgacccagcaacccagaga

SEQ ID NO: 929 - RNA, 21 nt, synthetic construct
  source 1..21: mol_type = other RNA
  modified_base 1: mod_base = OTHER; note = 2'-O-methyladenosine-3'- phosphorothioate
  modified_base 2: mod_base = OTHER; note = 2'-O-methyladenosine-3'- phosphorothioate
  modified_base 3: mod_base = OTHER; note = 2'-O-methylcytidine-3'-phosphate
  modified_base 4: mod_base = OTHER; note = 2'-O-methylcytidine-3'-phosphate
  modified_base 5: mod_base = OTHER; note = 2'-O-methylcytidine-3'-phosphate
  modified_base 6: mod_base = OTHER; note = 2'-O-hexadecyl-adenosine-3'-phosphate
  modified_base 7: mod_base = OTHER; note = 2'-fluoroguanosine-3'-phosphate
  modified_base 8: mod_base = OTHER; note = 2'-O-methyladenosine-3'-phosphate
  modified_base 9: mod_base = OTHER; note = 2'-fluoroguanosine-3'-phosphate
  modified_base 10: mod_base = OTHER; note = 2'-fluorocytidine-3'-phosphate
  modified_base 11: mod_base = OTHER; note = 2'-fluorocytidine-3'-phosphate
  modified_base 12: mod_base = OTHER; note = 2'-O-methylcytidine-3'-phosphate
  modified_base 13: mod_base = OTHER; note = 2'-O-methyladenosine-3'-phosphate
  modified_base 14: mod_base = OTHER; note = 2'-O-methyluridine-3'-phosphate
  modified_base 15: mod_base = OTHER; note = 2'-O-methylguanosine-3'-phosphate
  modified_base 16: mod_base = OTHER; note = 2'-O-methyladenosine-3'-phosphate
  modified_base 17: mod_base = OTHER; note = 2'-O-methylguanosine-3'-phosphate
  modified_base 18: mod_base = OTHER; note = 2'-O-methylguanosine-3'-phosphate
  modified_base 19: mod_base = OTHER; note = 2'-O-methylguanosine-3'-phosphate
  modified_base 20: mod_base = OTHER; note = 2'-O-methyladenosine-3'-phosphate
  modified_base 21: mod_base = OTHER; note = 2'-O-methyladenosine-3'-phosphate N-[tris(GalNAc-alkyl)-amidodecanoyl)]-4-hydroxyprolinol Hyp-(GalNAc-alkyl)3 (2S,4R)-1-[29-[[2-(acetylamino)-2-deoxy-beta-D-galactopyran osyl]oxy]-14,14-bis[[3-[[3-[[5-[[2-(acetylamino)-2-deoxy-be ta-D-galactopyranosyl]oxy]-1-oxopentyl]amino]propyl]amino]- 3-oxopropoxy]methyl]-1,12,19,25-tetraoxo-16-oxa-13,20,24-tr iazanonacos-1-yl]-4-hydroxy-2-hydroxymethylpyrrolidine
aacccagagcccatgagggaa

SEQ ID NO: 930 - RNA, 21 nt, synthetic construct
  source 1..21: mol_type = other RNA
  modified_base 1: mod_base = OTHER; note = 2'-O-methylcytidine-3'- phosphorothioate
  modified_base 2: mod_base = OTHER; note = 2'-O-methylcytidine-3'- phosphorothioate
  modified_base 3: mod_base = OTHER; note = 2'-O-methylcytidine-3'-phosphate
  modified_base 4: mod_base = OTHER; note = 2'-O-methyladenosine-3'-phosphate
  modified_base 5: mod_base = OTHER; note = 2'-O-methylguanosine-3'-phosphate
  modified_base 6: mod_base = OTHER; note = 2'-O-hexadecyl-adenosine-3'-phosphate
  modified_base 7: mod_base = OTHER; note = 2'-fluoroguanosine-3'-phosphate
  modified_base 8: mod_base = OTHER; note = 2'-O-methylcytidine-3'-phosphate
  modified_base 9: mod_base = OTHER; note = 2'-fluorocytidine-3'-phosphate
  modified_base 10: mod_base = OTHER; note = 2'-fluorocytidine-3'-phosphate
  modified_base 11: mod_base = OTHER; note = 2'-fluoroadenosine-3'-phosphate
  modified_base 12: mod_base = OTHER; note = 2'-O-methyluridine-3'-phosphate
  modified_base 13: mod_base = OTHER; note = 2'-O-methylguanosine-3'-phosphate
  modified_base 14: mod_base = OTHER; note = 2'-O-methyladenosine-3'-phosphate
  modified_base 15: mod_base = OTHER; note = 2'-O-methylguanosine-3'-phosphate
  modified_base 16: mod_base = OTHER; note = 2'-O-methylguanosine-3'-phosphate
  modified_base 17: mod_base = OTHER; note = 2'-O-methylguanosine-3'-phosphate
  modified_base 18: mod_base = OTHER; note = 2'-O-methyladenosine-3'-phosphate
  modified_base 19: mod_base = OTHER; note = 2'-O-methylcytidine-3'-phosphate
  modified_base 20: mod_base = OTHER; note = 2'-O-methyladenosine-3'-phosphate
  modified_base 21: mod_base = OTHER; note = 2'-O-methyladenosine-3'-phosphate N-[tris(GalNAc-alkyl)-amidodecanoyl)]-4-hydroxyprolinol Hyp-(GalNAc-alkyl)3 (2S,4R)-1-[29-[[2-(acetylamino)-2-deoxy-beta-D-galactopyran osyl]oxy]-14,14-bis[[3-[[3-[[5-[[2-(acetylamino)-2-deoxy-be ta-D-galactopyranosyl]oxy]-1-oxopentyl]amino]propyl]amino]- 3-oxopropoxy]methyl]-1,12,19,25-tetraoxo-16-oxa-13,20,24-tr iazanonacos-1-yl]-4-hydroxy-2-hydroxymethylpyrrolidine
cccagagcccatgagggacaa

SEQ ID NO: 931 - RNA, 21 nt, synthetic construct
  source 1..21: mol_type = other RNA
  modified_base 1: mod_base = OTHER; note = 2'-O-methylcytidine-3'- phosphorothioate
  modified_base 2: mod_base = OTHER; note = 2'-O-methylcytidine-3'- phosphorothioate
  modified_base 3: mod_base = OTHER; note = 2'-O-methyladenosine-3'-phosphate
  modified_base 4: mod_base = OTHER; note = 2'-O-methylguanosine-3'-phosphate
  modified_base 5: mod_base = OTHER; note = 2'-O-methyladenosine-3'-phosphate
  modified_base 6: mod_base = OTHER; note = 2'-O-hexadecyl-guanosine-3'-phosphate
  modified_base 7: mod_base = OTHER; note = 2'-fluorocytidine-3'-phosphate
  modified_base 8: mod_base = OTHER; note = 2'-O-methylcytidine-3'-phosphate
  modified_base 9: mod_base = OTHER; note = 2'-fluorocytidine-3'-phosphate
  modified_base 10: mod_base = OTHER; note = 2'-fluoroadenosine-3'-phosphate
  modified_base 11: mod_base = OTHER; note = 2'-fluorouridine-3'-phosphate
  modified_base 12: mod_base = OTHER; note = 2'-O-methylguanosine-3'-phosphate
  modified_base 13: mod_base = OTHER; note = 2'-O-methyladenosine-3'-phosphate
  modified_base 14: mod_base = OTHER; note = 2'-O-methylguanosine-3'-phosphate
  modified_base 15: mod_base = OTHER; note = 2'-O-methylguanosine-3'-phosphate
  modified_base 16: mod_base = OTHER; note = 2'-O-methylguanosine-3'-phosphate
  modified_base 17: mod_base = OTHER; note = 2'-O-methyladenosine-3'-phosphate
  modified_base 18: mod_base = OTHER; note = 2'-O-methylcytidine-3'-phosphate
  modified_base 19: mod_base = OTHER; note = 2'-O-methyladenosine-3'-phosphate
  modified_base 20: mod_base = OTHER; note = 2'-O-methylcytidine-3'-phosphate
  modified_base 21: mod_base = OTHER; note = 2'-O-methyladenosine-3'-phosphate N-[tris(GalNAc-alkyl)-amidodecanoyl)]-4-hydroxyprolinol Hyp-(GalNAc-alkyl)3 (2S,4R)-1-[29-[[2-(acetylamino)-2-deoxy-beta-D-galactopyran osyl]oxy]-14,14-bis[[3-[[3-[[5-[[2-(acetylamino)-2-deoxy-be ta-D-galactopyranosyl]oxy]-1-oxopentyl]amino]propyl]amino]- 3-oxopropoxy]methyl]-1,12,19,25-tetraoxo-16-oxa-13,20,24-tr iazanonacos-1-yl]-4-hydroxy-2-hydroxymethylpyrrolidine
ccagagcccatgagggacaca

SEQ ID NO: 932 - RNA, 21 nt, synthetic construct
  source 1..21: mol_type = other RNA
  modified_base 1: mod_base = OTHER; note = 2'-O-methylguanosine-3'- phosphorothioate
  modified_base 2: mod_base = OTHER; note = 2'-O-methylcytidine-3'- phosphorothioate
  modified_base 3: mod_base = OTHER; note = 2'-O-methyluridine-3'-phosphate
  modified_base 4: mod_base = OTHER; note = 2'-O-methylcytidine-3'-phosphate
  modified_base 5: mod_base = OTHER; note = 2'-O-methylcytidine-3'-phosphate
  modified_base 6: mod_base = OTHER; note = 2'-O-hexadecyl-cytidine-3'-phosphate
  modified_base 7: mod_base = OTHER; note = 2'-fluorouridine-3'-phosphate
  modified_base 8: mod_base = OTHER; note = 2'-O-methylcytidine-3'-phosphate
  modified_base 9: mod_base = OTHER; note = 2'-fluoroadenosine-3'-phosphate
  modified_base 10: mod_base = OTHER; note = 2'-fluorocytidine-3'-phosphate
  modified_base 11: mod_base = OTHER; note = 2'-fluorouridine-3'-phosphate
  modified_base 12: mod_base = OTHER; note = 2'-O-methyluridine-3'-phosphate
  modified_base 13: mod_base = OTHER; note = 2'-O-methylguanosine-3'-phosphate
  modified_base 14: mod_base = OTHER; note = 2'-O-methylguanosine-3'-phosphate
  modified_base 15: mod_base = OTHER; note = 2'-O-methylguanosine-3'-phosphate
  modified_base 16: mod_base = OTHER; note = 2'-O-methyluridine-3'-phosphate
  modified_base 17: mod_base = OTHER; note = 2'-O-methylcytidine-3'-phosphate
  modified_base 18: mod_base = OTHER; note = 2'-O-methyluridine-3'-phosphate
  modified_base 19: mod_base = OTHER; note = 2'-O-methyluridine-3'-phosphate
  modified_base 20: mod_base = OTHER; note = 2'-O-methylcytidine-3'-phosphate
  modified_base 21: mod_base = OTHER; note = 2'-O-methyladenosine-3'-phosphate N-[tris(GalNAc-alkyl)-amidodecanoyl)]-4-hydroxyprolinol Hyp-(GalNAc-alkyl)3 (2S,4R)-1-[29-[[2-(acetylamino)-2-deoxy-beta-D-galactopyran osyl]oxy]-14,14-bis[[3-[[3-[[5-[[2-(acetylamino)-2-deoxy-be ta-D-galactopyranosyl]oxy]-1-oxopentyl]amino]propyl]amino]- 3-oxopropoxy]methyl]-1,12,19,25-tetraoxo-16-oxa-13,20,24-tr iazanonacos-1-yl]-4-hydroxy-2-hydroxymethylpyrrolidine
gctccctcacttgggtcttca

SEQ ID NO: 933 - RNA, 21 nt, synthetic construct
  source 1..21: mol_type = other RNA
  modified_base 1: mod_base = OTHER; note = 2'-O-methyluridine-3'-phosphorothioate
  modified_base 2: mod_base = OTHER; note = 2'-O-methylcytidine-3'- phosphorothioate
  modified_base 3: mod_base = OTHER; note = 2'-O-methylcytidine-3'-phosphate
  modified_base 4: mod_base = OTHER; note = 2'-O-methylcytidine-3'-phosphate
  modified_base 5: mod_base = OTHER; note = 2'-O-methyluridine-3'-phosphate
  modified_base 6: mod_base = OTHER; note = 2'-O-hexadecyl-cytidine-3'-phosphate
  modified_base 7: mod_base = OTHER; note = 2'-fluoroadenosine-3'-phosphate
  modified_base 8: mod_base = OTHER; note = 2'-O-methylcytidine-3'-phosphate
  modified_base 9: mod_base = OTHER; note = 2'-fluorouridine-3'-phosphate
  modified_base 10: mod_base = OTHER; note = 2'-fluorouridine-3'-phosphate
  modified_base 11: mod_base = OTHER; note = 2'-fluoroguanosine-3'-phosphate
  modified_base 12: mod_base = OTHER; note = 2'-O-methylguanosine-3'-phosphate
  modified_base 13: mod_base = OTHER; note = 2'-O-methylguanosine-3'-phosphate
  modified_base 14: mod_base = OTHER; note = 2'-O-methyluridine-3'-phosphate
  modified_base 15: mod_base = OTHER; note = 2'-O-methylcytidine-3'-phosphate
  modified_base 16: mod_base = OTHER; note = 2'-O-methyluridine-3'-phosphate
  modified_base 17: mod_base = OTHER; note = 2'-O-methyluridine-3'-phosphate
  modified_base 18: mod_base = OTHER; note = 2'-O-methylcytidine-3'-phosphate
  modified_base 19: mod_base = OTHER; note = 2'-O-methylcytidine-3'-phosphate
  modified_base 20: mod_base = OTHER; note = 2'-O-methylcytidine-3'-phosphate
  modified_base 21: mod_base = OTHER; note = 2'-O-methyladenosine-3'-phosphate N-[tris(GalNAc-alkyl)-amidodecanoyl)]-4-hydroxyprolinol Hyp-(GalNAc-alkyl)3 (2S,4R)-1-[29-[[2-(acetylamino)-2-deoxy-beta-D-galactopyran osyl]oxy]-14,14-bis[[3-[[3-[[5-[[2-(acetylamino)-2-deoxy-be ta-D-galactopyranosyl]oxy]-1-oxopentyl]amino]propyl]amino]- 3-oxopropoxy]methyl]-1,12,19,25-tetraoxo-16-oxa-13,20,24-tr iazanonacos-1-yl]-4-hydroxy-2-hydroxymethylpyrrolidine
tccctcacttgggtcttccca

SEQ ID NO: 934 - RNA, 21 nt, synthetic construct
  source 1..21: mol_type = other RNA
  modified_base 1: mod_base = OTHER; note = 2'-O-methyluridine-3'-phosphorothioate
  modified_base 2: mod_base = OTHER; note = 2'-O-methylcytidine-3'- phosphorothioate
  modified_base 3: mod_base = OTHER; note = 2'-O-methyladenosine-3'-phosphate
  modified_base 4: mod_base = OTHER; note = 2'-O-methylcytidine-3'-phosphate
  modified_base 5: mod_base = OTHER; note = 2'-O-methyluridine-3'-phosphate
  modified_base 6: mod_base = OTHER; note = 2'-O-hexadecyl-uridine-3'-phosphate
  modified_base 7: mod_base = OTHER; note = 2'-fluoroguanosine-3'-phosphate
  modified_base 8: mod_base = OTHER; note = 2'-O-methylguanosine-3'-phosphate
  modified_base 9: mod_base = OTHER; note = 2'-fluoroguanosine-3'-phosphate
  modified_base 10: mod_base = OTHER; note = 2'-fluorouridine-3'-phosphate
  modified_base 11: mod_base = OTHER; note = 2'-fluorocytidine-3'-phosphate
  modified_base 12: mod_base = OTHER; note = 2'-O-methyluridine-3'-phosphate
  modified_base 13: mod_base = OTHER; note = 2'-O-methyluridine-3'-phosphate
  modified_base 14: mod_base = OTHER; note = 2'-O-methylcytidine-3'-phosphate
  modified_base 15: mod_base = OTHER; note = 2'-O-methylcytidine-3'-phosphate
  modified_base 16: mod_base = OTHER; note = 2'-O-methylcytidine-3'-phosphate
  modified_base 17: mod_base = OTHER; note = 2'-O-methyluridine-3'-phosphate
  modified_base 18: mod_base = OTHER; note = 2'-O-methyluridine-3'-phosphate
  modified_base 19: mod_base = OTHER; note = 2'-O-methylguanosine-3'-phosphate
  modified_base 20: mod_base = OTHER; note = 2'-O-methyluridine-3'-phosphate
  modified_base 21: mod_base = OTHER; note = 2'-O-methyladenosine-3'-phosphate N-[tris(GalNAc-alkyl)-amidodecanoyl)]-4-hydroxyprolinol Hyp-(GalNAc-alkyl)3 (2S,4R)-1-[29-[[2-(acetylamino)-2-deoxy-beta-D-galactopyran osyl]oxy]-14,14-bis[[3-[[3-[[5-[[2-(acetylamino)-2-deoxy-be ta-D-galactopyranosyl]oxy]-1-oxopentyl]amino]propyl]amino]- 3-oxopropoxy]methyl]-1,12,19,25-tetraoxo-16-oxa-13,20,24-tr iazanonacos-1-yl]-4-hydroxy-2-hydroxymethylpyrrolidine
tcacttgggtcttcccttgta

SEQ ID NO: 935 - RNA, 21 nt, synthetic construct
  source 1..21: mol_type = other RNA
  modified_base 1: mod_base = OTHER; note = 2'-O-methyluridine-3'-phosphorothioate
  modified_base 2: mod_base = OTHER; note = 2'-O-methyluridine-3'-phosphorothioate
  modified_base 3: mod_base = OTHER; note = 2'-O-methylguanosine-3'-phosphate
  modified_base 4: mod_base = OTHER; note = 2'-O-methylguanosine-3'-phosphate
  modified_base 5: mod_base = OTHER; note = 2'-O-methylguanosine-3'-phosphate
  modified_base 6: mod_base = OTHER; note = 2'-O-hexadecyl-uridine-3'-phosphate
  modified_base 7: mod_base = OTHER; note = 2'-fluorocytidine-3'-phosphate
  modified_base 8: mod_base = OTHER; note = 2'-O-methyluridine-3'-phosphate
  modified_base 9: mod_base = OTHER; note = 2'-fluorouridine-3'-phosphate
  modified_base 10: mod_base = OTHER; note = 2'-fluorocytidine-3'-phosphate
  modified_base 11: mod_base = OTHER; note = 2'-fluorocytidine-3'-phosphate
  modified_base 12: mod_base = OTHER; note = 2'-O-methylcytidine-3'-phosphate
  modified_base 13: mod_base = OTHER; note = 2'-O-methyluridine-3'-phosphate
  modified_base 14: mod_base = OTHER; note = 2'-O-methyluridine-3'-phosphate
  modified_base 15: mod_base = OTHER; note = 2'-O-methylguanosine-3'-phosphate
  modified_base 16: mod_base = OTHER; note = 2'-O-methyluridine-3'-phosphate
  modified_base 17: mod_base = OTHER; note = 2'-O-methylcytidine-3'-phosphate
  modified_base 18: mod_base = OTHER; note = 2'-O-methylcytidine-3'-phosphate
  modified_base 19: mod_base = OTHER; note = 2'-O-methyluridine-3'-phosphate
  modified_base 20: mod_base = OTHER; note = 2'-O-methylcytidine-3'-phosphate
  modified_base 21: mod_base = OTHER; note = 2'-O-methyladenosine-3'-phosphate N-[tris(GalNAc-alkyl)-amidodecanoyl)]-4-hydroxyprolinol Hyp-(GalNAc-alkyl)3 (2S,4R)-1-[29-[[2-(acetylamino)-2-deoxy-beta-D-galactopyran osyl]oxy]-14,14-bis[[3-[[3-[[5-[[2-(acetylamino)-2-deoxy-be ta-D-galactopyranosyl]oxy]-1-oxopentyl]amino]propyl]amino]- 3-oxopropoxy]methyl]-1,12,19,25-tetraoxo-16-oxa-13,20,24-tr iazanonacos-1-yl]-4-hydroxy-2-hydroxymethylpyrrolidine
ttgggtcttcccttgtcctca

SEQ ID NO: 936 - RNA, 21 nt, synthetic construct
  source 1..21: mol_type = other RNA
  modified_base 1: mod_base = OTHER; note = 2'-O-methylguanosine-3'- phosphorothioate
  modified_base 2: mod_base = OTHER; note = 2'-O-methylguanosine-3'- phosphorothioate
  modified_base 3: mod_base = OTHER; note = 2'-O-methylguanosine-3'-phosphate
  modified_base 4: mod_base = OTHER; note = 2'-O-methyluridine-3'-phosphate
  modified_base 5: mod_base = OTHER; note = 2'-O-methylcytidine-3'-phosphate
  modified_base 6: mod_base = OTHER; note = 2'-O-hexadecyl-uridine-3'-phosphate
  modified_base 7: mod_base = OTHER; note = 2'-fluorouridine-3'-phosphate
  modified_base 8: mod_base = OTHER; note = 2'-O-methylcytidine-3'-phosphate
  modified_base 9: mod_base = OTHER; note = 2'-fluorocytidine-3'-phosphate
  modified_base 10: mod_base = OTHER; note = 2'-fluorocytidine-3'-phosphate
  modified_base 11: mod_base = OTHER; note = 2'-fluorouridine-3'-phosphate
  modified_base 12: mod_base = OTHER; note = 2'-O-methyluridine-3'-phosphate
  modified_base 13: mod_base = OTHER; note = 2'-O-methylguanosine-3'-phosphate
  modified_base 14: mod_base = OTHER; note = 2'-O-methyluridine-3'-phosphate
  modified_base 15: mod_base = OTHER; note = 2'-O-methylcytidine-3'-phosphate
  modified_base 16: mod_base = OTHER; note = 2'-O-methylcytidine-3'-phosphate
  modified_base 17: mod_base = OTHER; note = 2'-O-methyluridine-3'-phosphate
  modified_base 18: mod_base = OTHER; note = 2'-O-methylcytidine-3'-phosphate
  modified_base 19: mod_base = OTHER; note = 2'-O-methyluridine-3'-phosphate
  modified_base 20: mod_base = OTHER; note = 2'-O-methylcytidine-3'-phosphate
  modified_base 21: mod_base = OTHER; note = 2'-O-methyladenosine-3'-phosphate N-[tris(GalNAc-alkyl)-amidodecanoyl)]-4-hydroxyprolinol Hyp-(GalNAc-alkyl)3 (2S,4R)-1-[29-[[2-(acetylamino)-2-deoxy-beta-D-galactopyran osyl]oxy]-14,14-bis[[3-[[3-[[5-[[2-(acetylamino)-2-deoxy-be ta-D-galactopyranosyl]oxy]-1-oxopentyl]amino]propyl]amino]- 3-oxopropoxy]methyl]-1,12,19,25-tetraoxo-16-oxa-13,20,24-tr iazanonacos-1-yl]-4-hydroxy-2-hydroxymethylpyrrolidine
gggtcttcccttgtcctctca

SEQ ID NO: 937 - RNA, 21 nt, synthetic construct
  source 1..21: mol_type = other RNA
  modified_base 1: mod_base = OTHER; note = 2'-O-methylguanosine-3'- phosphorothioate
  modified_base 2: mod_base = OTHER; note = 2'-O-methylguanosine-3'- phosphorothioate
  modified_base 3: mod_base = OTHER; note = 2'-O-methyluridine-3'-phosphate
  modified_base 4: mod_base = OTHER; note = 2'-O-methylcytidine-3'-phosphate
  modified_base 5: mod_base = OTHER; note = 2'-O-methyluridine-3'-phosphate
  modified_base 6: mod_base = OTHER; note = 2'-O-hexadecyl-uridine-3'-phosphate
  modified_base 7: mod_base = OTHER; note = 2'-fluorocytidine-3'-phosphate
  modified_base 8: mod_base = OTHER; note = 2'-O-methylcytidine-3'-phosphate
  modified_base 9: mod_base = OTHER; note = 2'-fluorocytidine-3'-phosphate
  modified_base 10: mod_base = OTHER; note = 2'-fluorouridine-3'-phosphate
  modified_base 11: mod_base = OTHER; note = 2'-fluorouridine-3'-phosphate
  modified_base 12: mod_base = OTHER; note = 2'-O-methylguanosine-3'-phosphate
  modified_base 13: mod_base = OTHER; note = 2'-O-methyluridine-3'-phosphate
  modified_base 14: mod_base = OTHER; note = 2'-O-methylcytidine-3'-phosphate
  modified_base 15: mod_base = OTHER; note = 2'-O-methylcytidine-3'-phosphate
  modified_base 16: mod_base = OTHER; note = 2'-O-methyluridine-3'-phosphate
  modified_base 17: mod_base = OTHER; note = 2'-O-methylcytidine-3'-phosphate
  modified_base 18: mod_base = OTHER; note = 2'-O-methyluridine-3'-phosphate
  modified_base 19: mod_base = OTHER; note = 2'-O-methylcytidine-3'-phosphate
  modified_base 20: mod_base = OTHER; note = 2'-O-methylguanosine-3'-phosphate
  modified_base 21: mod_base = OTHER; note = 2'-O-methyladenosine-3'-phosphate N-[tris(GalNAc-alkyl)-amidodecanoyl)]-4-hydroxyprolinol Hyp-(GalNAc-alkyl)3 (2S,4R)-1-[29-[[2-(acetylamino)-2-deoxy-beta-D-galactopyran osyl]oxy]-14,14-bis[[3-[[3-[[5-[[2-(acetylamino)-2-deoxy-be ta-D-galactopyranosyl]oxy]-1-oxopentyl]amino]propyl]amino]- 3-oxopropoxy]methyl]-1,12,19,25-tetraoxo-16-oxa-13,20,24-tr iazanonacos-1-yl]-4-hydroxy-2-hydroxymethylpyrrolidine
ggtcttcccttgtcctctcga

SEQ ID NO: 938 - RNA, 21 nt, synthetic construct
  source 1..21: mol_type = other RNA
  modified_base 1: mod_base = OTHER; note = 2'-O-methylguanosine-3'- phosphorothioate
  modified_base 2: mod_base = OTHER; note = 2'-O-methylcytidine-3'- phosphorothioate
  modified_base 3: mod_base = OTHER; note = 2'-O-methylcytidine-3'-phosphate
  modified_base 4: mod_base = OTHER; note = 2'-O-methyluridine-3'-phosphate
  modified_base 5: mod_base = OTHER; note = 2'-O-methylguanosine-3'-phosphate
  modified_base 6: mod_base = OTHER; note = 2'-O-hexadecyl-uridine-3'-phosphate
  modified_base 7: mod_base = OTHER; note = 2'-fluorocytidine-3'-phosphate
  modified_base 8: mod_base = OTHER; note = 2'-O-methylcytidine-3'-phosphate
  modified_base 9: mod_base = OTHER; note = 2'-fluorouridine-3'-phosphate
  modified_base 10: mod_base = OTHER; note = 2'-fluoroguanosine-3'-phosphate
  modified_base 11: mod_base = OTHER; note = 2'-fluoroadenosine-3'-phosphate
  modified_base 12: mod_base = OTHER; note = 2'-O-methyladenosine-3'-phosphate
  modified_base 13: mod_base = OTHER; note = 2'-O-methyluridine-3'-phosphate
  modified_base 14: mod_base = OTHER; note = 2'-O-methyluridine-3'-phosphate
  modified_base 15: mod_base = OTHER; note = 2'-O-methylcytidine-3'-phosphate
  modified_base 16: mod_base = OTHER; note = 2'-O-methyladenosine-3'-phosphate
  modified_base 17: mod_base = OTHER; note = 2'-O-methylcytidine-3'-phosphate
  modified_base 18: mod_base = OTHER; note = 2'-O-methylcytidine-3'-phosphate
  modified_base 19: mod_base = OTHER; note = 2'-O-methylguanosine-3'-phosphate
  modified_base 20: mod_base = OTHER; note = 2'-O-methyladenosine-3'-phosphate
  modified_base 21: mod_base = OTHER; note = 2'-O-methyladenosine-3'-phosphate N-[tris(GalNAc-alkyl)-amidodecanoyl)]-4-hydroxyprolinol Hyp-(GalNAc-alkyl)3 (2S,4R)-1-[29-[[2-(acetylamino)-2-deoxy-beta-D-galactopyran osyl]oxy]-14,14-bis[[3-[[3-[[5-[[2-(acetylamino)-2-deoxy-be ta-D-galactopyranosyl]oxy]-1-oxopentyl]amino]propyl]amino]- 3-oxopropoxy]methyl]-1,12,19,25-tetraoxo-16-oxa-13,20,24-tr iazanonacos-1-yl]-4-hydroxy-2-hydroxymethylpyrrolidine
gcctgtcctgaattcaccgaa

SEQ ID NO: 939 - RNA, 21 nt, synthetic construct
  source 1..21: mol_type = other RNA
  modified_base 1: mod_base = OTHER; note = 2'-O-methylcytidine-3'- phosphorothioate
  modified_base 2: mod_base = OTHER; note = 2'-O-methylcytidine-3'- phosphorothioate
  modified_base 3: mod_base = OTHER; note = 2'-O-methylcytidine-3'-phosphate
  modified_base 4: mod_base = OTHER; note = 2'-O-methyluridine-3'-phosphate
  modified_base 5: mod_base = OTHER; note = 2'-O-methyluridine-3'-phosphate
  modified_base 6: mod_base = OTHER; note = 2'-O-hexadecyl-cytidine-3'-phosphate
  modified_base 7: mod_base = OTHER; note = 2'-fluoroguanosine-3'-phosphate
  modified_base 8: mod_base = OTHER; note = 2'-O-methylcytidine-3'-phosphate
  modified_base 9: mod_base = OTHER; note = 2'-fluoroadenosine-3'-phosphate
  modified_base 10: mod_base = OTHER; note = 2'-fluoroguanosine-3'-phosphate
  modified_base 11: mod_base = OTHER; note = 2'-fluoroguanosine-3'-phosphate
  modified_base 12: mod_base = OTHER; note = 2'-O-methyladenosine-3'-phosphate
  modified_base 13: mod_base = OTHER; note = 2'-O-methyluridine-3'-phosphate
  modified_base 14: mod_base = OTHER; note = 2'-O-methylguanosine-3'-phosphate
  modified_base 15: mod_base = OTHER; note = 2'-O-methylcytidine-3'-phosphate
  modified_base 16: mod_base = OTHER; note = 2'-O-methylguanosine-3'-phosphate
  modified_base 17: mod_base = OTHER; note = 2'-O-methyladenosine-3'-phosphate
  modified_base 18: mod_base = OTHER; note = 2'-O-methyladenosine-3'-phosphate
  modified_base 19: mod_base = OTHER; note = 2'-O-methylguanosine-3'-phosphate
  modified_base 20: mod_base = OTHER; note = 2'-O-methyladenosine-3'-phosphate
  modified_base 21: mod_base = OTHER; note = 2'-O-methyladenosine-3'-phosphate N-[tris(GalNAc-alkyl)-amidodecanoyl)]-4-hydroxyprolinol Hyp-(GalNAc-alkyl)3 (2S,4R)-1-[29-[[2-(acetylamino)-2-deoxy-beta-D-galactopyran osyl]oxy]-14,14-bis[[3-[[3-[[5-[[2-(acetylamino)-2-deoxy-be ta-D-galactopyranosyl]oxy]-1-oxopentyl]amino]propyl]amino]- 3-oxopropoxy]methyl]-1,12,19,25-tetraoxo-16-oxa-13,20,24-tr iazanonacos-1-yl]-4-hydroxy-2-hydroxymethylpyrrolidine
cccttcgcaggatgcgaagaa

SEQ ID NO: 940 - RNA, 21 nt, synthetic construct
  source 1..21: mol_type = other RNA
  modified_base 1: mod_base = OTHER; note = 2'-O-methyluridine-3'-phosphorothioate
  modified_base 2: mod_base = OTHER; note = 2'-O-methyladenosine-3'- phosphorothioate
  modified_base 3: mod_base = OTHER; note = 2'-O-methyluridine-3'-phosphate
  modified_base 4: mod_base = OTHER; note = 2'-O-methyluridine-3'-phosphate
  modified_base 5: mod_base = OTHER; note = 2'-O-methyluridine-3'-phosphate
  modified_base 6: mod_base = OTHER; note = 2'-O-hexadecyl-guanosine-3'-phosphate
  modified_base 7: mod_base = OTHER; note = 2'-fluorocytidine-3'-phosphate
  modified_base 8: mod_base = OTHER; note = 2'-O-methylguanosine-3'-phosphate
  modified_base 9: mod_base = OTHER; note = 2'-fluoroadenosine-3'-phosphate
  modified_base 10: mod_base = OTHER; note = 2'-fluoroguanosine-3'-phosphate
  modified_base 11: mod_base = OTHER; note = 2'-fluoroadenosine-3'-phosphate
  modified_base 12: mod_base = OTHER; note = 2'-O-methyladenosine-3'-phosphate
  modified_base 13: mod_base = OTHER; note = 2'-O-methyladenosine-3'-phosphate
  modified_base 14: mod_base = OTHER; note = 2'-O-methylcytidine-3'-phosphate
  modified_base 15: mod_base = OTHER; note = 2'-O-methylcytidine-3'-phosphate
  modified_base 16: mod_base = OTHER; note = 2'-O-methyladenosine-3'-phosphate
  modified_base 17: mod_base = OTHER; note = 2'-O-methylguanosine-3'-phosphate
  modified_base 18: mod_base = OTHER; note = 2'-O-methylguanosine-3'-phosphate
  modified_base 19: mod_base = OTHER; note = 2'-O-methylguanosine-3'-phosphate
  modified_base 20: mod_base = OTHER; note = 2'-O-methylcytidine-3'-phosphate
  modified_base 21: mod_base = OTHER; note = 2'-O-methyladenosine-3'-phosphate N-[tris(GalNAc-alkyl)-amidodecanoyl)]-4-hydroxyprolinol Hyp-(GalNAc-alkyl)3 (2S,4R)-1-[29-[[2-(acetylamino)-2-deoxy-beta-D-galactopyran osyl]oxy]-14,14-bis[[3-[[3-[[5-[[2-(acetylamino)-2-deoxy-be ta-D-galactopyranosyl]oxy]-1-oxopentyl]amino]propyl]amino]- 3-oxopropoxy]methyl]-1,12,19,25-tetraoxo-16-oxa-13,20,24-tr iazanonacos-1-yl]-4-hydroxy-2-hydroxymethylpyrrolidine
tatttgcgagaaaccagggca

SEQ ID NO: 941 - RNA, 21 nt, synthetic construct
  source 1..21: mol_type = other RNA
  modified_base 1: mod_base = OTHER; note = 2'-O-methyladenosine-3'- phosphorothioate
  modified_base 2: mod_base = OTHER; note = 2'-O-methyladenosine-3'- phosphorothioate
  modified_base 3: mod_base = OTHER; note = 2'-O-methylcytidine-3'-phosphate
  modified_base 4: mod_base = OTHER; note = 2'-O-methyluridine-3'-phosphate
  modified_base 5: mod_base = OTHER; note = 2'-O-methylguanosine-3'-phosphate
  modified_base 6: mod_base = OTHER; note = 2'-O-hexadecyl-cytidine-3'-phosphate
  modified_base 7: mod_base = OTHER; note = 2'-fluoroguanosine-3'-phosphate
  modified_base 8: mod_base = OTHER; note = 2'-O-methyluridine-3'-phosphate
  modified_base 9: mod_base = OTHER; note = 2'-fluorouridine-3'-phosphate
  modified_base 10: mod_base = OTHER; note = 2'-fluoroguanosine-3'-phosphate
  modified_base 11: mod_base = OTHER; note = 2'-fluorouridine-3'-phosphate
  modified_base 12: mod_base = OTHER; note = 2'-O-methylguanosine-3'-phosphate
  modified_base 13: mod_base = OTHER; note = 2'-O-methyladenosine-3'-phosphate
  modified_base 14: mod_base = OTHER; note = 2'-O-methyladenosine-3'-phosphate
  modified_base 15: mod_base = OTHER; note = 2'-O-methylguanosine-3'-phosphate
  modified_base 16: mod_base = OTHER; note = 2'-O-methyladenosine-3'-phosphate
  modified_base 17: mod_base = OTHER; note = 2'-O-methylguanosine-3'-phosphate
  modified_base 18: mod_base = OTHER; note = 2'-O-methyladenosine-3'-phosphate
  modified_base 19: mod_base = OTHER; note = 2'-O-methyladenosine-3'-phosphate
  modified_base 20: mod_base = OTHER; note = 2'-O-methylcytidine-3'-phosphate
  modified_base 21: mod_base = OTHER; note = 2'-O-methyladenosine-3'-phosphate N-[tris(GalNAc-alkyl)-amidodecanoyl)]-4-hydroxyprolinol Hyp-(GalNAc-alkyl)3 (2S,4R)-1-[29-[[2-(acetylamino)-2-deoxy-beta-D-galactopyran osyl]oxy]-14,14-bis[[3-[[3-[[5-[[2-(acetylamino)-2-deoxy-be ta-D-galactopyranosyl]oxy]-1-oxopentyl]amino]propyl]amino]- 3-oxopropoxy]methyl]-1,12,19,25-tetraoxo-16-oxa-13,20,24-tr iazanonacos-1-yl]-4-hydroxy-2-hydroxymethylpyrrolidine
aactgcgttgtgaagagaaca

SEQ ID NO: 942 - RNA, 21 nt, synthetic construct
  source 1..21: mol_type = other RNA
  modified_base 1: mod_base = OTHER; note = 2'-O-methylcytidine-3'- phosphorothioate
  modified_base 2: mod_base = OTHER; note = 2'-O-methyluridine-3'-phosphorothioate
  modified_base 3: mod_base = OTHER; note = 2'-O-methylguanosine-3'-phosphate
  modified_base 4: mod_base = OTHER; note = 2'-O-methylcytidine-3'-phosphate
  modified_base 5: mod_base = OTHER; note = 2'-O-methylguanosine-3'-phosphate
  modified_base 6: mod_base = OTHER; note = 2'-O-hexadecyl-uridine-3'-phosphate
  modified_base 7: mod_base = OTHER; note = 2'-fluorouridine-3'-phosphate
  modified_base 8: mod_base = OTHER; note = 2'-O-methylguanosine-3'-phosphate
  modified_base 9: mod_base = OTHER; note = 2'-fluorouridine-3'-phosphate
  modified_base 10: mod_base = OTHER; note = 2'-fluoroguanosine-3'-phosphate
  modified_base 11: mod_base = OTHER; note = 2'-fluoroadenosine-3'-phosphate
  modified_base 12: mod_base = OTHER; note = 2'-O-methyladenosine-3'-phosphate
  modified_base 13: mod_base = OTHER; note = 2'-O-methylguanosine-3'-phosphate
  modified_base 14: mod_base = OTHER; note = 2'-O-methyladenosine-3'-phosphate
  modified_base 15: mod_base = OTHER; note = 2'-O-methylguanosine-3'-phosphate
  modified_base 16: mod_base = OTHER; note = 2'-O-methyladenosine-3'-phosphate
  modified_base 17: mod_base = OTHER; note = 2'-O-methyladenosine-3'-phosphate
  modified_base 18: mod_base = OTHER; note = 2'-O-methylcytidine-3'-phosphate
  modified_base 19: mod_base = OTHER; note = 2'-O-methyluridine-3'-phosphate
  modified_base 20: mod_base = OTHER; note = 2'-O-methyluridine-3'-phosphate
  modified_base 21: mod_base = OTHER; note = 2'-O-methyladenosine-3'-phosphate N-[tris(GalNAc-alkyl)-amidodecanoyl)]-4-hydroxyprolinol Hyp-(GalNAc-alkyl)3 (2S,4R)-1-[29-[[2-(acetylamino)-2-deoxy-beta-D-galactopyran osyl]oxy]-14,14-bis[[3-[[3-[[5-[[2-(acetylamino)-2-deoxy-be ta-D-galactopyranosyl]oxy]-1-oxopentyl]amino]propyl]amino]- 3-oxopropoxy]methyl]-1,12,19,25-tetraoxo-16-oxa-13,20,24-tr iazanonacos-1-yl]-4-hydroxy-2-hydroxymethylpyrrolidine
ctgcgttgtgaagagaactta

SEQ ID NO: 943 - RNA, 21 nt, synthetic construct
  source 1..21: mol_type = other RNA
  modified_base 1: mod_base = OTHER; note = 2'-O-methylcytidine-3'- phosphorothioate
  modified_base 2: mod_base = OTHER; note = 2'-O-methylguanosine-3'- phosphorothioate
  modified_base 3: mod_base = OTHER; note = 2'-O-methyluridine-3'-phosphate
  modified_base 4: mod_base = OTHER; note = 2'-O-methyluridine-3'-phosphate
  modified_base 5: mod_base = OTHER; note = 2'-O-methylguanosine-3'-phosphate
  modified_base 6: mod_base = OTHER; note = 2'-O-hexadecyl-uridine-3'-phosphate
  modified_base 7: mod_base = OTHER; note = 2'-fluoroguanosine-3'-phosphate
  modified_base 8: mod_base = OTHER; note = 2'-O-methyladenosine-3'-phosphate
  modified_base 9: mod_base = OTHER; note = 2'-fluoroadenosine-3'-phosphate
  modified_base 10: mod_base = OTHER; note = 2'-fluoroguanosine-3'-phosphate
  modified_base 11: mod_base = OTHER; note = 2'-fluoroadenosine-3'-phosphate
  modified_base 12: mod_base = OTHER; note = 2'-O-methylguanosine-3'-phosphate
  modified_base 13: mod_base = OTHER; note = 2'-O-methyladenosine-3'-phosphate
  modified_base 14: mod_base = OTHER; note = 2'-O-methyladenosine-3'-phosphate
  modified_base 15: mod_base = OTHER; note = 2'-O-methylcytidine-3'-phosphate
  modified_base 16: mod_base = OTHER; note = 2'-O-methyluridine-3'-phosphate
  modified_base 17: mod_base = OTHER; note = 2'-O-methyluridine-3'-phosphate
  modified_base 18: mod_base = OTHER; note = 2'-O-methylguanosine-3'-phosphate
  modified_base 19: mod_base = OTHER; note = 2'-O-methylguanosine-3'-phosphate
  modified_base 20: mod_base = OTHER; note = 2'-O-methyladenosine-3'-phosphate
  modified_base 21: mod_base = OTHER; note = 2'-O-methyladenosine-3'-phosphate N-[tris(GalNAc-alkyl)-amidodecanoyl)]-4-hydroxyprolinol Hyp-(GalNAc-alkyl)3 (2S,4R)-1-[29-[[2-(acetylamino)-2-deoxy-beta-D-galactopyran osyl]oxy]-14,14-bis[[3-[[3-[[5-[[2-(acetylamino)-2-deoxy-be ta-D-galactopyranosyl]oxy]-1-oxopentyl]amino]propyl]amino]- 3-oxopropoxy]methyl]-1,12,19,25-tetraoxo-16-oxa-13,20,24-tr iazanonacos-1-yl]-4-hydroxy-2-hydroxymethylpyrrolidine
cgttgtgaagagaacttggaa

SEQ ID NO: 944 - RNA, 21 nt, synthetic construct
  source 1..21: mol_type = other RNA
  modified_base 1: mod_base = OTHER; note = 2'-O-methylguanosine-3'- phosphorothioate
  modified_base 2: mod_base = OTHER; note = 2'-O-methyladenosine-3'- phosphorothioate
  modified_base 3: mod_base = OTHER; note = 2'-O-methyladenosine-3'-phosphate
  modified_base 4: mod_base = OTHER; note = 2'-O-methylguanosine-3'-phosphate
  modified_base 5: mod_base = OTHER; note = 2'-O-methyladenosine-3'-phosphate
  modified_base 6: mod_base = OTHER; note = 2'-O-hexadecyl-guanosine-3'-phosphate
  modified_base 7: mod_base = OTHER; note = 2'-fluoroadenosine-3'-phosphate
  modified_base 8: mod_base = OTHER; note = 2'-O-methyladenosine-3'-phosphate
  modified_base 9: mod_base = OTHER; note = 2'-fluorocytidine-3'-phosphate
  modified_base 10: mod_base = OTHER; note = 2'-fluorouridine-3'-phosphate
  modified_base 11: mod_base = OTHER; note = 2'-fluorouridine-3'-phosphate
  modified_base 12: mod_base = OTHER; note = 2'-O-methylguanosine-3'-phosphate
  modified_base 13: mod_base = OTHER; note = 2'-O-methylguanosine-3'-phosphate
  modified_base 14: mod_base = OTHER; note = 2'-O-methyladenosine-3'-phosphate
  modified_base 15: mod_base = OTHER; note = 2'-O-methylguanosine-3'-phosphate
  modified_base 16: mod_base = OTHER; note = 2'-O-methylguanosine-3'-phosphate
  modified_base 17: mod_base = OTHER; note = 2'-O-methyladenosine-3'-phosphate
  modified_base 18: mod_base = OTHER; note = 2'-O-methylguanosine-3'-phosphate
  modified_base 19: mod_base = OTHER; note = 2'-O-methylcytidine-3'-phosphate
  modified_base 20: mod_base = OTHER; note = 2'-O-methylcytidine-3'-phosphate
  modified_base 21: mod_base = OTHER; note = 2'-O-methyladenosine-3'-phosphate N-[tris(GalNAc-alkyl)-amidodecanoyl)]-4-hydroxyprolinol Hyp-(GalNAc-alkyl)3 (2S,4R)-1-[29-[[2-(acetylamino)-2-deoxy-beta-D-galactopyran osyl]oxy]-14,14-bis[[3-[[3-[[5-[[2-(acetylamino)-2-deoxy-be ta-D-galactopyranosyl]oxy]-1-oxopentyl]amino]propyl]amino]- 3-oxopropoxy]methyl]-1,12,19,25-tetraoxo-16-oxa-13,20,24-tr iazanonacos-1-yl]-4-hydroxy-2-hydroxymethylpyrrolidine
gaagagaacttggaggagcca

SEQ ID NO: 945 - RNA, 21 nt, synthetic construct
  source 1..21: mol_type = other RNA
  modified_base 1: mod_base = OTHER; note = 2'-O-methyladenosine-3'- phosphorothioate
  modified_base 2: mod_base = OTHER; note = 2'-O-methyladenosine-3'- phosphorothioate
  modified_base 3: mod_base = OTHER; note = 2'-O-methylguanosine-3'-phosphate
  modified_base 4: mod_base = OTHER; note = 2'-O-methyladenosine-3'-phosphate
  modified_base 5: mod_base = OTHER; note = 2'-O-methylguanosine-3'-phosphate
  modified_base 6: mod_base = OTHER; note = 2'-O-hexadecyl-adenosine-3'-phosphate
  modified_base 7: mod_base = OTHER; note = 2'-fluoroadenosine-3'-phosphate
  modified_base 8: mod_base = OTHER; note = 2'-O-methylcytidine-3'-phosphate
  modified_base 9: mod_base = OTHER; note = 2'-fluorouridine-3'-phosphate
  modified_base 10: mod_base = OTHER; note = 2'-fluorouridine-3'-phosphate
  modified_base 11: mod_base = OTHER; note = 2'-fluoroguanosine-3'-phosphate
  modified_base 12: mod_base = OTHER; note = 2'-O-methylguanosine-3'-phosphate
  modified_base 13: mod_base = OTHER; note = 2'-O-methyladenosine-3'-phosphate
  modified_base 14: mod_base = OTHER; note = 2'-O-methylguanosine-3'-phosphate
  modified_base 15: mod_base = OTHER; note = 2'-O-methylguanosine-3'-phosphate
  modified_base 16: mod_base = OTHER; note = 2'-O-methyladenosine-3'-phosphate
  modified_base 17: mod_base = OTHER; note = 2'-O-methylguanosine-3'-phosphate
  modified_base 18: mod_base = OTHER; note = 2'-O-methylcytidine-3'-phosphate
  modified_base 19: mod_base = OTHER; note = 2'-O-methylcytidine-3'-phosphate
  modified_base 20: mod_base = OTHER; note = 2'-O-methylguanosine-3'-phosphate
  modified_base 21: mod_base = OTHER; note = 2'-O-methyladenosine-3'-phosphate N-[tris(GalNAc-alkyl)-amidodecanoyl)]-4-hydroxyprolinol Hyp-(GalNAc-alkyl)3 (2S,4R)-1-[29-[[2-(acetylamino)-2-deoxy-beta-D-galactopyran osyl]oxy]-14,14-bis[[3-[[3-[[5-[[2-(acetylamino)-2-deoxy-be ta-D-galactopyranosyl]oxy]-1-oxopentyl]amino]propyl]amino]- 3-oxopropoxy]methyl]-1,12,19,25-tetraoxo-16-oxa-13,20,24-tr iazanonacos-1-yl]-4-hydroxy-2-hydroxymethylpyrrolidine
aagagaacttggaggagccga

SEQ ID NO: 946 - RNA, 21 nt, synthetic construct
  source 1..21: mol_type = other RNA
  modified_base 1: mod_base = OTHER; note = 2'-O-methyladenosine-3'- phosphorothioate
  modified_base 2: mod_base = OTHER; note = 2'-O-methylguanosine-3'- phosphorothioate
  modified_base 3: mod_base = OTHER; note = 2'-O-methyladenosine-3'-phosphate
  modified_base 4: mod_base = OTHER; note = 2'-O-methyladenosine-3'-phosphate
  modified_base 5: mod_base = OTHER; note = 2'-O-methylcytidine-3'-phosphate
  modified_base 6: mod_base = OTHER; note = 2'-O-hexadecyl-uridine-3'-phosphate
  modified_base 7: mod_base = OTHER; note = 2'-fluorouridine-3'-phosphate
  modified_base 8: mod_base = OTHER; note = 2'-O-methylguanosine-3'-phosphate
  modified_base 9: mod_base = OTHER; note = 2'-fluoroguanosine-3'-phosphate
  modified_base 10: mod_base = OTHER; note = 2'-fluoroadenosine-3'-phosphate
  modified_base 11: mod_base = OTHER; note = 2'-fluoroguanosine-3'-phosphate
  modified_base 12: mod_base = OTHER; note = 2'-O-methylguanosine-3'-phosphate
  modified_base 13: mod_base = OTHER; note = 2'-O-methyladenosine-3'-phosphate
  modified_base 14: mod_base = OTHER; note = 2'-O-methylguanosine-3'-phosphate
  modified_base 15: mod_base = OTHER; note = 2'-O-methylcytidine-3'-phosphate
  modified_base 16: mod_base = OTHER; note = 2'-O-methylcytidine-3'-phosphate
  modified_base 17: mod_base = OTHER; note = 2'-O-methylguanosine-3'-phosphate
  modified_base 18: mod_base = OTHER; note = 2'-O-methyladenosine-3'-phosphate
  modified_base 19: mod_base = OTHER; note = 2'-O-methylguanosine-3'-phosphate
  modified_base 20: mod_base = OTHER; note = 2'-O-methyladenosine-3'-phosphate
  modified_base 21: mod_base = OTHER; note = 2'-O-methyladenosine-3'-phosphate N-[tris(GalNAc-alkyl)-amidodecanoyl)]-4-hydroxyprolinol Hyp-(GalNAc-alkyl)3 (2S,4R)-1-[29-[[2-(acetylamino)-2-deoxy-beta-D-galactopyran osyl]oxy]-14,14-bis[[3-[[3-[[5-[[2-(acetylamino)-2-deoxy-be ta-D-galactopyranosyl]oxy]-1-oxopentyl]amino]propyl]amino]- 3-oxopropoxy]methyl]-1,12,19,25-tetraoxo-16-oxa-13,20,24-tr iazanonacos-1-yl]-4-hydroxy-2-hydroxymethylpyrrolidine
agaacttggaggagccgagaa

SEQ ID NO: 947 - RNA, 21 nt, synthetic construct
  source 1..21: mol_type = other RNA
  modified_base 1: mod_base = OTHER; note = 2'-O-methylguanosine-3'- phosphorothioate
  modified_base 2: mod_base = OTHER; note = 2'-O-methyladenosine-3'- phosphorothioate
  modified_base 3: mod_base = OTHER; note = 2'-O-methyladenosine-3'-phosphate
  modified_base 4: mod_base = OTHER; note = 2'-O-methylcytidine-3'-phosphate
  modified_base 5: mod_base = OTHER; note = 2'-O-methyluridine-3'-phosphate
  modified_base 6: mod_base = OTHER; note = 2'-O-hexadecyl-uridine-3'-phosphate
  modified_base 7: mod_base = OTHER; note = 2'-fluoroguanosine-3'-phosphate
  modified_base 8: mod_base = OTHER; note = 2'-O-methylguanosine-3'-phosphate
  modified_base 9: mod_base = OTHER; note = 2'-fluoroadenosine-3'-phosphate
  modified_base 10: mod_base = OTHER; note = 2'-fluoroguanosine-3'-phosphate
  modified_base 11: mod_base = OTHER; note = 2'-fluoroguanosine-3'-phosphate
  modified_base 12: mod_base = OTHER; note = 2'-O-methyladenosine-3'-phosphate
  modified_base 13: mod_base = OTHER; note = 2'-O-methylguanosine-3'-phosphate
  modified_base 14: mod_base = OTHER; note = 2'-O-methylcytidine-3'-phosphate
  modified_base 15: mod_base = OTHER; note = 2'-O-methylcytidine-3'-phosphate
  modified_base 16: mod_base = OTHER; note = 2'-O-methylguanosine-3'-phosphate
  modified_base 17: mod_base = OTHER; note = 2'-O-methyladenosine-3'-phosphate
  modified_base 18: mod_base = OTHER; note = 2'-O-methylguanosine-3'-phosphate
  modified_base 19: mod_base = OTHER; note = 2'-O-methyladenosine-3'-phosphate
  modified_base 20: mod_base = OTHER; note = 2'-O-methyluridine-3'-phosphate
  modified_base 21: mod_base = OTHER; note = 2'-O-methyladenosine-3'-phosphate N-[tris(GalNAc-alkyl)-amidodecanoyl)]-4-hydroxyprolinol Hyp-(GalNAc-alkyl)3 (2S,4R)-1-[29-[[2-(acetylamino)-2-deoxy-beta-D-galactopyran osyl]oxy]-14,14-bis[[3-[[3-[[5-[[2-(acetylamino)-2-deoxy-be ta-D-galactopyranosyl]oxy]-1-oxopentyl]amino]propyl]amino]- 3-oxopropoxy]methyl]-1,12,19,25-tetraoxo-16-oxa-13,20,24-tr iazanonacos-1-yl]-4-hydroxy-2-hydroxymethylpyrrolidine
gaacttggaggagccgagata

SEQ ID NO: 948 - RNA, 21 nt, synthetic construct
  source 1..21: mol_type = other RNA
  modified_base 1: mod_base = OTHER; note = 2'-O-methyladenosine-3'- phosphorothioate
  modified_base 2: mod_base = OTHER; note = 2'-O-methyladenosine-3'- phosphorothioate
  modified_base 3: mod_base = OTHER; note = 2'-O-methylcytidine-3'-phosphate
  modified_base 4: mod_base = OTHER; note = 2'-O-methyluridine-3'-phosphate
  modified_base 5: mod_base = OTHER; note = 2'-O-methyluridine-3'-phosphate
  modified_base 6: mod_base = OTHER; note = 2'-O-hexadecyl-guanosine-3'-phosphate
  modified_base 7: mod_base = OTHER; note = 2'-fluoroguanosine-3'-phosphate
  modified_base 8: mod_base = OTHER; note = 2'-O-methyladenosine-3'-phosphate
  modified_base 9: mod_base = OTHER; note = 2'-fluoroguanosine-3'-phosphate
  modified_base 10: mod_base = OTHER; note = 2'-fluoroguanosine-3'-phosphate
  modified_base 11: mod_base = OTHER; note = 2'-fluoroadenosine-3'-phosphate
  modified_base 12: mod_base = OTHER; note = 2'-O-methylguanosine-3'-phosphate
  modified_base 13: mod_base = OTHER; note = 2'-O-methylcytidine-3'-phosphate
  modified_base 14: mod_base = OTHER; note = 2'-O-methylcytidine-3'-phosphate
  modified_base 15: mod_base = OTHER; note = 2'-O-methylguanosine-3'-phosphate
  modified_base 16: mod_base = OTHER; note = 2'-O-methyladenosine-3'-phosphate
  modified_base 17: mod_base = OTHER; note = 2'-O-methylguanosine-3'-phosphate
  modified_base 18: mod_base = OTHER; note = 2'-O-methyladenosine-3'-phosphate
  modified_base 19: mod_base = OTHER; note = 2'-O-methyluridine-3'-phosphate
  modified_base 20: mod_base = OTHER; note = 2'-O-methyluridine-3'-phosphate
  modified_base 21: mod_base = OTHER; note = 2'-O-methyladenosine-3'-phosphate N-[tris(GalNAc-alkyl)-amidodecanoyl)]-4-hydroxyprolinol Hyp-(GalNAc-alkyl)3 (2S,4R)-1-[29-[[2-(acetylamino)-2-deoxy-beta-D-galactopyran osyl]oxy]-14,14-bis[[3-[[3-[[5-[[2-(acetylamino)-2-deoxy-be ta-D-galactopyranosyl]oxy]-1-oxopentyl]amino]propyl]amino]- 3-oxopropoxy]methyl]-1,12,19,25-tetraoxo-16-oxa-13,20,24-tr iazanonacos-1-yl]-4-hydroxy-2-hydroxymethylpyrrolidine
aacttggaggagccgagatta

SEQ ID NO: 949 - RNA, 21 nt, synthetic construct
  source 1..21: mol_type = other RNA
  modified_base 1: mod_base = OTHER; note = 2'-O-methyladenosine-3'- phosphorothioate
  modified_base 2: mod_base = OTHER; note = 2'-O-methylguanosine-3'- phosphorothioate
  modified_base 3: mod_base = OTHER; note = 2'-O-methylguanosine-3'-phosphate
  modified_base 4: mod_base = OTHER; note = 2'-O-methyladenosine-3'-phosphate
  modified_base 5: mod_base = OTHER; note = 2'-O-methylguanosine-3'-phosphate
  modified_base 6: mod_base = OTHER; note = 2'-O-hexadecyl-cytidine-3'-phosphate
  modified_base 7: mod_base = OTHER; note = 2'-fluorocytidine-3'-phosphate
  modified_base 8: mod_base = OTHER; note = 2'-O-methylguanosine-3'-phosphate
  modified_base 9: mod_base = OTHER; note = 2'-fluoroadenosine-3'-phosphate
  modified_base 10: mod_base = OTHER; note = 2'-fluoroguanosine-3'-phosphate
  modified_base 11: mod_base = OTHER; note = 2'-fluoroadenosine-3'-phosphate
  modified_base 12: mod_base = OTHER; note = 2'-O-methyluridine-3'-phosphate
  modified_base 13: mod_base = OTHER; note = 2'-O-methyluridine-3'-phosphate
  modified_base 14: mod_base = OTHER; note = 2'-O-methyluridine-3'-phosphate
  modified_base 15: mod_base = OTHER; note = 2'-O-methylguanosine-3'-phosphate
  modified_base 16: mod_base = OTHER; note = 2'-O-methylcytidine-3'-phosphate
  modified_base 17: mod_base = OTHER; note = 2'-O-methyluridine-3'-phosphate
  modified_base 18: mod_base = OTHER; note = 2'-O-methylcytidine-3'-phosphate
  modified_base 19: mod_base = OTHER; note = 2'-O-methyladenosine-3'-phosphate
  modified_base 20: mod_base = OTHER; note = 2'-O-methylguanosine-3'-phosphate
  modified_base 21: mod_base = OTHER; note = 2'-O-methyladenosine-3'-phosphate N-[tris(GalNAc-alkyl)-amidodecanoyl)]-4-hydroxyprolinol Hyp-(GalNAc-alkyl)3 (2S,4R)-1-[29-[[2-(acetylamino)-2-deoxy-beta-D-galactopyran osyl]oxy]-14,14-bis[[3-[[3-[[5-[[2-(acetylamino)-2-deoxy-be ta-D-galactopyranosyl]oxy]-1-oxopentyl]amino]propyl]amino]- 3-oxopropoxy]methyl]-1,12,19,25-tetraoxo-16-oxa-13,20,24-tr iazanonacos-1-yl]-4-hydroxy-2-hydroxymethylpyrrolidine
aggagccgagatttgctcaga

SEQ ID NO: 950 - RNA, 21 nt, synthetic construct
  source 1..21: mol_type = other RNA
  modified_base 1: mod_base = OTHER; note = 2'-O-methylguanosine-3'- phosphorothioate
  modified_base 2: mod_base = OTHER; note = 2'-O-methylguanosine-3'- phosphorothioate
  modified_base 3: mod_base = OTHER; note = 2'-O-methyladenosine-3'-phosphate
  modified_base 4: mod_base = OTHER; note = 2'-O-methylguanosine-3'-phosphate
  modified_base 5: mod_base = OTHER; note = 2'-O-methylcytidine-3'-phosphate
  modified_base 6: mod_base = OTHER; note = 2'-O-hexadecyl-cytidine-3'-phosphate
  modified_base 7: mod_base = OTHER; note = 2'-fluoroguanosine-3'-phosphate
  modified_base 8: mod_base = OTHER; note = 2'-O-methyladenosine-3'-phosphate
  modified_base 9: mod_base = OTHER; note = 2'-fluoroguanosine-3'-phosphate
  modified_base 10: mod_base = OTHER; note = 2'-fluoroadenosine-3'-phosphate
  modified_base 11: mod_base = OTHER; note = 2'-fluorouridine-3'-phosphate
  modified_base 12: mod_base = OTHER; note = 2'-O-methyluridine-3'-phosphate
  modified_base 13: mod_base = OTHER; note = 2'-O-methyluridine-3'-phosphate
  modified_base 14: mod_base = OTHER; note = 2'-O-methylguanosine-3'-phosphate
  modified_base 15: mod_base = OTHER; note = 2'-O-methylcytidine-3'-phosphate
  modified_base 16: mod_base = OTHER; note = 2'-O-methyluridine-3'-phosphate
  modified_base 17: mod_base = OTHER; note = 2'-O-methylcytidine-3'-phosphate
  modified_base 18: mod_base = OTHER; note = 2'-O-methyladenosine-3'-phosphate
  modified_base 19: mod_base = OTHER; note = 2'-O-methylguanosine-3'-phosphate
  modified_base 20: mod_base = OTHER; note = 2'-O-methyluridine-3'-phosphate
  modified_base 21: mod_base = OTHER; note = 2'-O-methyladenosine-3'-phosphate N-[tris(GalNAc-alkyl)-amidodecanoyl)]-4-hydroxyprolinol Hyp-(GalNAc-alkyl)3 (2S,4R)-1-[29-[[2-(acetylamino)-2-deoxy-beta-D-galactopyran osyl]oxy]-14,14-bis[[3-[[3-[[5-[[2-(acetylamino)-2-deoxy-be ta-D-galactopyranosyl]oxy]-1-oxopentyl]amino]propyl]amino]- 3-oxopropoxy]methyl]-1,12,19,25-tetraoxo-16-oxa-13,20,24-tr iazanonacos-1-yl]-4-hydroxy-2-hydroxymethylpyrrolidine
ggagccgagatttgctcagta

SEQ ID NO: 951 - RNA, 21 nt, synthetic construct
  source 1..21: mol_type = other RNA
  modified_base 1: mod_base = OTHER; note = 2'-O-methyladenosine-3'- phosphorothioate
  modified_base 2: mod_base = OTHER; note = 2'-O-methylguanosine-3'- phosphorothioate
  modified_base 3: mod_base = OTHER; note = 2'-O-methylcytidine-3'-phosphate
  modified_base 4: mod_base = OTHER; note = 2'-O-methylcytidine-3'-phosphate
  modified_base 5: mod_base = OTHER; note = 2'-O-methylguanosine-3'-phosphate
  modified_base 6: mod_base = OTHER; note = 2'-O-hexadecyl-adenosine-3'-phosphate
  modified_base 7: mod_base = OTHER; note = 2'-fluoroguanosine-3'-phosphate
  modified_base 8: mod_base = OTHER; note = 2'-O-methyladenosine-3'-phosphate
  modified_base 9: mod_base = OTHER; note = 2'-fluorouridine-3'-phosphate
  modified_base 10: mod_base = OTHER; note = 2'-fluorouridine-3'-phosphate
  modified_base 11: mod_base = OTHER; note = 2'-fluorouridine-3'-phosphate
  modified_base 12: mod_base = OTHER; note = 2'-O-methylguanosine-3'-phosphate
  modified_base 13: mod_base = OTHER; note = 2'-O-methylcytidine-3'-phosphate
  modified_base 14: mod_base = OTHER; note = 2'-O-methyluridine-3'-phosphate
  modified_base 15: mod_base = OTHER; note = 2'-O-methylcytidine-3'-phosphate
  modified_base 16: mod_base = OTHER; note = 2'-O-methyladenosine-3'-phosphate
  modified_base 17: mod_base = OTHER; note = 2'-O-methylguanosine-3'-phosphate
  modified_base 18: mod_base = OTHER; note = 2'-O-methyluridine-3'-phosphate
  modified_base 19: mod_base = OTHER; note = 2'-O-methylguanosine-3'-phosphate
  modified_base 20: mod_base = OTHER; note = 2'-O-methylcytidine-3'-phosphate
  modified_base 21: mod_base = OTHER; note = 2'-O-methyladenosine-3'-phosphate N-[tris(GalNAc-alkyl)-amidodecanoyl)]-4-hydroxyprolinol Hyp-(GalNAc-alkyl)3 (2S,4R)-1-[29-[[2-(acetylamino)-2-deoxy-beta-D-galactopyran osyl]oxy]-14,14-bis[[3-[[3-[[5-[[2-(acetylamino)-2-deoxy-be ta-D-galactopyranosyl]oxy]-1-oxopentyl]amino]propyl]amino]- 3-oxopropoxy]methyl]-1,12,19,25-tetraoxo-16-oxa-13,20,24-tr iazanonacos-1-yl]-4-hydroxy-2-hydroxymethylpyrrolidine
agccgagatttgctcagtgca

SEQ ID NO: 952 - RNA, 21 nt, synthetic construct
  source 1..21: mol_type = other RNA
  modified_base 1: mod_base = OTHER; note = 2'-O-methylcytidine-3'- phosphorothioate
  modified_base 2: mod_base = OTHER; note = 2'-O-methylcytidine-3'- phosphorothioate
  modified_base 3: mod_base = OTHER; note = 2'-O-methylguanosine-3'-phosphate
  modified_base 4: mod_base = OTHER; note = 2'-O-methyladenosine-3'-phosphate
  modified_base 5: mod_base = OTHER; note = 2'-O-methylguanosine-3'-phosphate
  modified_base 6: mod_base = OTHER; note = 2'-O-hexadecyl-adenosine-3'-phosphate
  modified_base 7: mod_base = OTHER; note = 2'-fluorouridine-3'-phosphate
  modified_base 8: mod_base = OTHER; note = 2'-O-methyluridine-3'-phosphate
  modified_base 9: mod_base = OTHER; note = 2'-fluorouridine-3'-phosphate
  modified_base 10: mod_base = OTHER; note = 2'-fluoroguanosine-3'-phosphate
  modified_base 11: mod_base = OTHER; note = 2'-fluorocytidine-3'-phosphate
  modified_base 12: mod_base = OTHER; note = 2'-O-methyluridine-3'-phosphate
  modified_base 13: mod_base = OTHER; note = 2'-O-methylcytidine-3'-phosphate
  modified_base 14: mod_base = OTHER; note = 2'-O-methyladenosine-3'-phosphate
  modified_base 15: mod_base = OTHER; note = 2'-O-methylguanosine-3'-phosphate
  modified_base 16: mod_base = OTHER; note = 2'-O-methyluridine-3'-phosphate
  modified_base 17: mod_base = OTHER; note = 2'-O-methylguanosine-3'-phosphate
  modified_base 18: mod_base = OTHER; note = 2'-O-methylcytidine-3'-phosphate
  modified_base 19: mod_base = OTHER; note = 2'-O-methylcytidine-3'-phosphate
  modified_base 20: mod_base = OTHER; note = 2'-O-methyladenosine-3'-phosphate
  modified_base 21: mod_base = OTHER; note = 2'-O-methyladenosine-3'-phosphate N-[tris(GalNAc-alkyl)-amidodecanoyl)]-4-hydroxyprolinol Hyp-(GalNAc-alkyl)3 (2S,4R)-1-[29-[[2-(acetylamino)-2-deoxy-beta-D-galactopyran osyl]oxy]-14,14-bis[[3-[[3-[[5-[[2-(acetylamino)-2-deoxy-be ta-D-galactopyranosyl]oxy]-1-oxopentyl]amino]propyl]amino]- 3-oxopropoxy]methyl]-1,12,19,25-tetraoxo-16-oxa-13,20,24-tr iazanonacos-1-yl]-4-hydroxy-2-hydroxymethylpyrrolidine
ccgagatttgctcagtgccaa

SEQ ID NO: 953 - RNA, 21 nt, synthetic construct
  source 1..21: mol_type = other RNA
  modified_base 1: mod_base = OTHER; note = 2'-O-methylguanosine-3'- phosphorothioate
  modified_base 2: mod_base = OTHER; note = 2'-O-methyladenosine-3'- phosphorothioate
  modified_base 3: mod_base = OTHER; note = 2'-O-methylguanosine-3'-phosphate
  modified_base 4: mod_base = OTHER; note = 2'-O-methyladenosine-3'-phosphate
  modified_base 5: mod_base = OTHER; note = 2'-O-methyluridine-3'-phosphate
  modified_base 6: mod_base = OTHER; note = 2'-O-hexadecyl-uridine-3'-phosphate
  modified_base 7: mod_base = OTHER; note = 2'-fluorouridine-3'-phosphate
  modified_base 8: mod_base = OTHER; note = 2'-O-methylguanosine-3'-phosphate
  modified_base 9: mod_base = OTHER; note = 2'-fluorocytidine-3'-phosphate
  modified_base 10: mod_base = OTHER; note = 2'-fluorouridine-3'-phosphate
  modified_base 11: mod_base = OTHER; note = 2'-fluorocytidine-3'-phosphate
  modified_base 12: mod_base = OTHER; note = 2'-O-methyladenosine-3'-phosphate
  modified_base 13: mod_base = OTHER; note = 2'-O-methylguanosine-3'-phosphate
  modified_base 14: mod_base = OTHER; note = 2'-O-methyluridine-3'-phosphate
  modified_base 15: mod_base = OTHER; note = 2'-O-methylguanosine-3'-phosphate
  modified_base 16: mod_base = OTHER; note = 2'-O-methylcytidine-3'-phosphate
  modified_base 17: mod_base = OTHER; note = 2'-O-methylcytidine-3'-phosphate
  modified_base 18: mod_base = OTHER; note = 2'-O-methyladenosine-3'-phosphate
  modified_base 19: mod_base = OTHER; note = 2'-O-methylcytidine-3'-phosphate
  modified_base 20: mod_base = OTHER; note = 2'-O-methyluridine-3'-phosphate
  modified_base 21: mod_base = OTHER; note = 2'-O-methyladenosine-3'-phosphate N-[tris(GalNAc-alkyl)-amidodecanoyl)]-4-hydroxyprolinol Hyp-(GalNAc-alkyl)3 (2S,4R)-1-[29-[[2-(acetylamino)-2-deoxy-beta-D-galactopyran osyl]oxy]-14,14-bis[[3-[[3-[[5-[[2-(acetylamino)-2-deoxy-be ta-D-galactopyranosyl]oxy]-1-oxopentyl]amino]propyl]amino]- 3-oxopropoxy]methyl]-1,12,19,25-tetraoxo-16-oxa-13,20,24-tr iazanonacos-1-yl]-4-hydroxy-2-hydroxymethylpyrrolidine
gagatttgctcagtgccacta

SEQ ID NO: 954 - RNA, 21 nt, synthetic construct
  source 1..21: mol_type = other RNA
  modified_base 1: mod_base = OTHER; note = 2'-O-methyladenosine-3'- phosphorothioate
  modified_base 2: mod_base = OTHER; note = 2'-O-methylguanosine-3'- phosphorothioate
  modified_base 3: mod_base = OTHER; note = 2'-O-methyladenosine-3'-phosphate
  modified_base 4: mod_base = OTHER; note = 2'-O-methyluridine-3'-phosphate
  modified_base 5: mod_base = OTHER; note = 2'-O-methyluridine-3'-phosphate
  modified_base 6: mod_base = OTHER; note = 2'-O-hexadecyl-uridine-3'-phosphate
  modified_base 7: mod_base = OTHER; note = 2'-fluoroguanosine-3'-phosphate
  modified_base 8: mod_base = OTHER; note = 2'-O-methylcytidine-3'-phosphate
  modified_base 9: mod_base = OTHER; note = 2'-fluorouridine-3'-phosphate
  modified_base 10: mod_base = OTHER; note = 2'-fluorocytidine-3'-phosphate
  modified_base 11: mod_base = OTHER; note = 2'-fluoroadenosine-3'-phosphate
  modified_base 12: mod_base = OTHER; note = 2'-O-methylguanosine-3'-phosphate
  modified_base 13: mod_base = OTHER; note = 2'-O-methyluridine-3'-phosphate
  modified_base 14: mod_base = OTHER; note = 2'-O-methylguanosine-3'-phosphate
  modified_base 15: mod_base = OTHER; note = 2'-O-methylcytidine-3'-phosphate
  modified_base 16: mod_base = OTHER; note = 2'-O-methylcytidine-3'-phosphate
  modified_base 17: mod_base = OTHER; note = 2'-O-methyladenosine-3'-phosphate
  modified_base 18: mod_base = OTHER; note = 2'-O-methylcytidine-3'-phosphate
  modified_base 19: mod_base = OTHER; note = 2'-O-methyluridine-3'-phosphate
  modified_base 20: mod_base = OTHER; note = 2'-O-methyluridine-3'-phosphate
  modified_base 21: mod_base = OTHER; note = 2'-O-methyladenosine-3'-phosphate N-[tris(GalNAc-alkyl)-amidodecanoyl)]-4-hydroxyprolinol Hyp-(GalNAc-alkyl)3 (2S,4R)-1-[29-[[2-(acetylamino)-2-deoxy-beta-D-galactopyran osyl]oxy]-14,14-bis[[3-[[3-[[5-[[2-(acetylamino)-2-deoxy-be ta-D-galactopyranosyl]oxy]-1-oxopentyl]amino]propyl]amino]- 3-oxopropoxy]methyl]-1,12,19,25-tetraoxo-16-oxa-13,20,24-tr iazanonacos-1-yl]-4-hydroxy-2-hydroxymethylpyrrolidine
agatttgctcagtgccactta

SEQ ID NO: 955 - RNA, 21 nt, synthetic construct
  source 1..21: mol_type = other RNA
  modified_base 1: mod_base = OTHER; note = 2'-O-methylguanosine-3'- phosphorothioate
  modified_base 2: mod_base = OTHER; note = 2'-O-methyladenosine-3'- phosphorothioate
  modified_base 3: mod_base = OTHER; note = 2'-O-methyluridine-3'-phosphate
  modified_base 4: mod_base = OTHER; note = 2'-O-methyluridine-3'-phosphate
  modified_base 5: mod_base = OTHER; note = 2'-O-methyluridine-3'-phosphate
  modified_base 6: mod_base = OTHER; note = 2'-O-hexadecyl-guanosine-3'-phosphate
  modified_base 7: mod_base = OTHER; note = 2'-fluorocytidine-3'-phosphate
  modified_base 8: mod_base = OTHER; note = 2'-O-methyluridine-3'-phosphate
  modified_base 9: mod_base = OTHER; note = 2'-fluorocytidine-3'-phosphate
  modified_base 10: mod_base = OTHER; note = 2'-fluoroadenosine-3'-phosphate
  modified_base 11: mod_base = OTHER; note = 2'-fluoroguanosine-3'-phosphate
  modified_base 12: mod_base = OTHER; note = 2'-O-methyluridine-3'-phosphate
  modified_base 13: mod_base = OTHER; note = 2'-O-methylguanosine-3'-phosphate
  modified_base 14: mod_base = OTHER; note = 2'-O-methylcytidine-3'-phosphate
  modified_base 15: mod_base = OTHER; note = 2'-O-methylcytidine-3'-phosphate
  modified_base 16: mod_base = OTHER; note = 2'-O-methyladenosine-3'-phosphate
  modified_base 17: mod_base = OTHER; note = 2'-O-methylcytidine-3'-phosphate
  modified_base 18: mod_base = OTHER; note = 2'-O-methyluridine-3'-phosphate
  modified_base 19: mod_base = OTHER; note = 2'-O-methyluridine-3'-phosphate
  modified_base 20: mod_base = OTHER; note = 2'-O-methylcytidine-3'-phosphate
  modified_base 21: mod_base = OTHER; note = 2'-O-methyladenosine-3'-phosphate N-[tris(GalNAc-alkyl)-amidodecanoyl)]-4-hydroxyprolinol Hyp-(GalNAc-alkyl)3 (2S,4R)-1-[29-[[2-(acetylamino)-2-deoxy-beta-D-galactopyran osyl]oxy]-14,14-bis[[3-[[3-[[5-[[2-(acetylamino)-2-deoxy-be ta-D-galactopyranosyl]oxy]-1-oxopentyl]amino]propyl]amino]- 3-oxopropoxy]methyl]-1,12,19,25-tetraoxo-16-oxa-13,20,24-tr iazanonacos-1-yl]-4-hydroxy-2-hydroxymethylpyrrolidine
gatttgctcagtgccacttca

SEQ ID NO: 956 - RNA, 21 nt, synthetic construct
  source 1..21: mol_type = other RNA
  modified_base 1: mod_base = OTHER; note = 2'-O-methyluridine-3'-phosphorothioate
  modified_base 2: mod_base = OTHER; note = 2'-O-methyluridine-3'-phosphorothioate
  modified_base 3: mod_base = OTHER; note = 2'-O-methyluridine-3'-phosphate
  modified_base 4: mod_base = OTHER; note = 2'-O-methylguanosine-3'-phosphate
  modified_base 5: mod_base = OTHER; note = 2'-O-methylcytidine-3'-phosphate
  modified_base 6: mod_base = OTHER; note = 2'-O-hexadecyl-uridine-3'-phosphate
  modified_base 7: mod_base = OTHER; note = 2'-fluorocytidine-3'-phosphate
  modified_base 8: mod_base = OTHER; note = 2'-O-methyladenosine-3'-phosphate
  modified_base 9: mod_base = OTHER; note = 2'-fluoroguanosine-3'-phosphate
  modified_base 10: mod_base = OTHER; note = 2'-fluorouridine-3'-phosphate
  modified_base 11: mod_base = OTHER; note = 2'-fluoroguanosine-3'-phosphate
  modified_base 12: mod_base = OTHER; note = 2'-O-methylcytidine-3'-phosphate
  modified_base 13: mod_base = OTHER; note = 2'-O-methylcytidine-3'-phosphate
  modified_base 14: mod_base = OTHER; note = 2'-O-methyladenosine-3'-phosphate
  modified_base 15: mod_base = OTHER; note = 2'-O-methylcytidine-3'-phosphate
  modified_base 16: mod_base = OTHER; note = 2'-O-methyluridine-3'-phosphate
  modified_base 17: mod_base = OTHER; note = 2'-O-methyluridine-3'-phosphate
  modified_base 18: mod_base = OTHER; note = 2'-O-methylcytidine-3'-phosphate
  modified_base 19: mod_base = OTHER; note = 2'-O-methylcytidine-3'-phosphate
  modified_base 20: mod_base = OTHER; note = 2'-O-methylcytidine-3'-phosphate
  modified_base 21: mod_base = OTHER; note = 2'-O-methyladenosine-3'-phosphate N-[tris(GalNAc-alkyl)-amidodecanoyl)]-4-hydroxyprolinol Hyp-(GalNAc-alkyl)3 (2S,4R)-1-[29-[[2-(acetylamino)-2-deoxy-beta-D-galactopyran osyl]oxy]-14,14-bis[[3-[[3-[[5-[[2-(acetylamino)-2-deoxy-be ta-D-galactopyranosyl]oxy]-1-oxopentyl]amino]propyl]amino]- 3-oxopropoxy]methyl]-1,12,19,25-tetraoxo-16-oxa-13,20,24-tr iazanonacos-1-yl]-4-hydroxy-2-hydroxymethylpyrrolidine
tttgctcagtgccacttccca

SEQ ID NO: 957 - RNA, 21 nt, synthetic construct
  source 1..21: mol_type = other RNA
  modified_base 1: mod_base = OTHER; note = 2'-O-methylguanosine-3'- phosphorothioate
  modified_base 2: mod_base = OTHER; note = 2'-O-methylcytidine-3'- phosphorothioate
  modified_base 3: mod_base = OTHER; note = 2'-O-methyluridine-3'-phosphate
  modified_base 4: mod_base = OTHER; note = 2'-O-methylcytidine-3'-phosphate
  modified_base 5: mod_base = OTHER; note = 2'-O-methyladenosine-3'-phosphate
  modified_base 6: mod_base = OTHER; note = 2'-O-hexadecyl-guanosine-3'-phosphate
  modified_base 7: mod_base = OTHER; note = 2'-fluorouridine-3'-phosphate
  modified_base 8: mod_base = OTHER; note = 2'-O-methylguanosine-3'-phosphate
  modified_base 9: mod_base = OTHER; note = 2'-fluorocytidine-3'-phosphate
  modified_base 10: mod_base = OTHER; note = 2'-fluorocytidine-3'-phosphate
  modified_base 11: mod_base = OTHER; note = 2'-fluoroadenosine-3'-phosphate
  modified_base 12: mod_base = OTHER; note = 2'-O-methylcytidine-3'-phosphate
  modified_base 13: mod_base = OTHER; note = 2'-O-methyluridine-3'-phosphate
  modified_base 14: mod_base = OTHER; note = 2'-O-methyluridine-3'-phosphate
  modified_base 15: mod_base = OTHER; note = 2'-O-methylcytidine-3'-phosphate
  modified_base 16: mod_base = OTHER; note = 2'-O-methylcytidine-3'-phosphate
  modified_base 17: mod_base = OTHER; note = 2'-O-methylcytidine-3'-phosphate
  modified_base 18: mod_base = OTHER; note = 2'-O-methyluridine-3'-phosphate
  modified_base 19: mod_base = OTHER; note = 2'-O-methylcytidine-3'-phosphate
  modified_base 20: mod_base = OTHER; note = 2'-O-methyluridine-3'-phosphate
  modified_base 21: mod_base = OTHER; note = 2'-O-methyladenosine-3'-phosphate N-[tris(GalNAc-alkyl)-amidodecanoyl)]-4-hydroxyprolinol Hyp-(GalNAc-alkyl)3 (2S,4R)-1-[29-[[2-(acetylamino)-2-deoxy-beta-D-galactopyran osyl]oxy]-14,14-bis[[3-[[3-[[5-[[2-(acetylamino)-2-deoxy-be ta-D-galactopyranosyl]oxy]-1-oxopentyl]amino]propyl]amino]- 3-oxopropoxy]methyl]-1,12,19,25-tetraoxo-16-oxa-13,20,24-tr iazanonacos-1-yl]-4-hydroxy-2-hydroxymethylpyrrolidine
gctcagtgccacttccctcta

SEQ ID NO: 958 - RNA, 21 nt, synthetic construct
  source 1..21: mol_type = other RNA
  modified_base 1: mod_base = OTHER; note = 2'-O-methylcytidine-3'- phosphorothioate
  modified_base 2: mod_base = OTHER; note = 2'-O-methyluridine-3'-phosphorothioate
  modified_base 3: mod_base = OTHER; note = 2'-O-methylcytidine-3'-phosphate
  modified_base 4: mod_base = OTHER; note = 2'-O-methyladenosine-3'-phosphate
  modified_base 5: mod_base = OTHER; note = 2'-O-methylguanosine-3'-phosphate
  modified_base 6: mod_base = OTHER; note = 2'-O-hexadecyl-uridine-3'-phosphate
  modified_base 7: mod_base = OTHER; note = 2'-fluoroguanosine-3'-phosphate
  modified_base 8: mod_base = OTHER; note = 2'-O-methylcytidine-3'-phosphate
  modified_base 9: mod_base = OTHER; note = 2'-fluorocytidine-3'-phosphate
  modified_base 10: mod_base = OTHER; note = 2'-fluoroadenosine-3'-phosphate
  modified_base 11: mod_base = OTHER; note = 2'-fluorocytidine-3'-phosphate
  modified_base 12: mod_base = OTHER; note = 2'-O-methyluridine-3'-phosphate
  modified_base 13: mod_base = OTHER; note = 2'-O-methyluridine-3'-phosphate
  modified_base 14: mod_base = OTHER; note = 2'-O-methylcytidine-3'-phosphate
  modified_base 15: mod_base = OTHER; note = 2'-O-methylcytidine-3'-phosphate
  modified_base 16: mod_base = OTHER; note = 2'-O-methylcytidine-3'-phosphate
  modified_base 17: mod_base = OTHER; note = 2'-O-methyluridine-3'-phosphate
  modified_base 18: mod_base = OTHER; note = 2'-O-methylcytidine-3'-phosphate
  modified_base 19: mod_base = OTHER; note = 2'-O-methyluridine-3'-phosphate
  modified_base 20: mod_base = OTHER; note = 2'-O-methyluridine-3'-phosphate
  modified_base 21: mod_base = OTHER; note = 2'-O-methyladenosine-3'-phosphate N-[tris(GalNAc-alkyl)-amidodecanoyl)]-4-hydroxyprolinol Hyp-(GalNAc-alkyl)3 (2S,4R)-1-[29-[[2-(acetylamino)-2-deoxy-beta-D-galactopyran osyl]oxy]-14,14-bis[[3-[[3-[[5-[[2-(acetylamino)-2-deoxy-be ta-D-galactopyranosyl]oxy]-1-oxopentyl]amino]propyl]amino]- 3-oxopropoxy]methyl]-1,12,19,25-tetraoxo-16-oxa-13,20,24-tr iazanonacos-1-yl]-4-hydroxy-2-hydroxymethylpyrrolidine
ctcagtgccacttccctctta

SEQ ID NO: 959 - RNA, 21 nt, synthetic construct
  source 1..21: mol_type = other RNA
  modified_base 1: mod_base = OTHER; note = 2'-O-methyluridine-3'-phosphorothioate
  modified_base 2: mod_base = OTHER; note = 2'-O-methyluridine-3'-phosphorothioate
  modified_base 3: mod_base = OTHER; note = 2'-O-methylcytidine-3'-phosphate
  modified_base 4: mod_base = OTHER; note = 2'-O-methylcytidine-3'-phosphate
  modified_base 5: mod_base = OTHER; note = 2'-O-methylcytidine-3'-phosphate
  modified_base 6: mod_base = OTHER; note = 2'-O-hexadecyl-uridine-3'-phosphate
  modified_base 7: mod_base = OTHER; note = 2'-fluorocytidine-3'-phosphate
  modified_base 8: mod_base = OTHER; note = 2'-O-methyluridine-3'-phosphate
  modified_base 9: mod_base = OTHER; note = 2'-fluorouridine-3'-phosphate
  modified_base 10: mod_base = OTHER; note = 2'-fluorocytidine-3'-phosphate
  modified_base 11: mod_base = OTHER; note = 2'-fluorouridine-3'-phosphate
  modified_base 12: mod_base = OTHER; note = 2'-O-methyladenosine-3'-phosphate
  modified_base 13: mod_base = OTHER; note = 2'-O-methylguanosine-3'-phosphate
  modified_base 14: mod_base = OTHER; note = 2'-O-methyluridine-3'-phosphate
  modified_base 15: mod_base = OTHER; note = 2'-O-methylcytidine-3'-phosphate
  modified_base 16: mod_base = OTHER; note = 2'-O-methyluridine-3'-phosphate
  modified_base 17: mod_base = OTHER; note = 2'-O-methylguanosine-3'-phosphate
  modified_base 18: mod_base = OTHER; note = 2'-O-methyladenosine-3'-phosphate
  modified_base 19: mod_base = OTHER; note = 2'-O-methylguanosine-3'-phosphate
  modified_base 20: mod_base = OTHER; note = 2'-O-methyladenosine-3'-phosphate
  modified_base 21: mod_base = OTHER; note = 2'-O-methyladenosine-3'-phosphate N-[tris(GalNAc-alkyl)-amidodecanoyl)]-4-hydroxyprolinol Hyp-(GalNAc-alkyl)3 (2S,4R)-1-[29-[[2-(acetylamino)-2-deoxy-beta-D-galactopyran osyl]oxy]-14,14-bis[[3-[[3-[[5-[[2-(acetylamino)-2-deoxy-be ta-D-galactopyranosyl]oxy]-1-oxopentyl]amino]propyl]amino]- 3-oxopropoxy]methyl]-1,12,19,25-tetraoxo-16-oxa-13,20,24-tr iazanonacos-1-yl]-4-hydroxy-2-hydroxymethylpyrrolidine
ttccctcttctagtctgagaa

SEQ ID NO: 960 - RNA, 21 nt, synthetic construct
  source 1..21: mol_type = other RNA
  modified_base 1: mod_base = OTHER; note = 2'-O-methylcytidine-3'- phosphorothioate
  modified_base 2: mod_base = OTHER; note = 2'-O-methylcytidine-3'- phosphorothioate
  modified_base 3: mod_base = OTHER; note = 2'-O-methylcytidine-3'-phosphate
  modified_base 4: mod_base = OTHER; note = 2'-O-methyluridine-3'-phosphate
  modified_base 5: mod_base = OTHER; note = 2'-O-methylcytidine-3'-phosphate
  modified_base 6: mod_base = OTHER; note = 2'-O-hexadecyl-uridine-3'-phosphate
  modified_base 7: mod_base = OTHER; note = 2'-fluorouridine-3'-phosphate
  modified_base 8: mod_base = OTHER; note = 2'-O-methylcytidine-3'-phosphate
  modified_base 9: mod_base = OTHER; note = 2'-fluorouridine-3'-phosphate
  modified_base 10: mod_base = OTHER; note = 2'-fluoroadenosine-3'-phosphate
  modified_base 11: mod_base = OTHER; note = 2'-fluoroguanosine-3'-phosphate
  modified_base 12: mod_base = OTHER; note = 2'-O-methyluridine-3'-phosphate
  modified_base 13: mod_base = OTHER; note = 2'-O-methylcytidine-3'-phosphate
  modified_base 14: mod_base = OTHER; note = 2'-O-methyluridine-3'-phosphate
  modified_base 15: mod_base = OTHER; note = 2'-O-methylguanosine-3'-phosphate
  modified_base 16: mod_base = OTHER; note = 2'-O-methyladenosine-3'-phosphate
  modified_base 17: mod_base = OTHER; note = 2'-O-methylguanosine-3'-phosphate
  modified_base 18: mod_base = OTHER; note = 2'-O-methyladenosine-3'-phosphate
  modified_base 19: mod_base = OTHER; note = 2'-O-methylguanosine-3'-phosphate
  modified_base 20: mod_base = OTHER; note = 2'-O-methylguanosine-3'-phosphate
  modified_base 21: mod_base = OTHER; note = 2'-O-methyladenosine-3'-phosphate N-[tris(GalNAc-alkyl)-amidodecanoyl)]-4-hydroxyprolinol Hyp-(GalNAc-alkyl)3 (2S,4R)-1-[29-[[2-(acetylamino)-2-deoxy-beta-D-galactopyran osyl]oxy]-14,14-bis[[3-[[3-[[5-[[2-(acetylamino)-2-deoxy-be ta-D-galactopyranosyl]oxy]-1-oxopentyl]amino]propyl]amino]- 3-oxopropoxy]methyl]-1,12,19,25-tetraoxo-16-oxa-13,20,24-tr iazanonacos-1-yl]-4-hydroxy-2-hydroxymethylpyrrolidine
ccctcttctagtctgagagga

SEQ ID NO: 961 - RNA, 21 nt, synthetic construct
  source 1..21: mol_type = other RNA
  modified_base 1: mod_base = OTHER; note = 2'-O-methylcytidine-3'- phosphorothioate
  modified_base 2: mod_base = OTHER; note = 2'-O-methyluridine-3'-phosphorothioate
  modified_base 3: mod_base = OTHER; note = 2'-O-methylcytidine-3'-phosphate
  modified_base 4: mod_base = OTHER; note = 2'-O-methyluridine-3'-phosphate
  modified_base 5: mod_base = OTHER; note = 2'-O-methyluridine-3'-phosphate
  modified_base 6: mod_base = OTHER; note = 2'-O-hexadecyl-cytidine-3'-phosphate
  modified_base 7: mod_base = OTHER; note = 2'-fluorouridine-3'-phosphate
  modified_base 8: mod_base = OTHER; note = 2'-O-methyladenosine-3'-phosphate
  modified_base 9: mod_base = OTHER; note = 2'-fluoroguanosine-3'-phosphate
  modified_base 10: mod_base = OTHER; note = 2'-fluorouridine-3'-phosphate
  modified_base 11: mod_base = OTHER; note = 2'-fluorocytidine-3'-phosphate
  modified_base 12: mod_base = OTHER; note = 2'-O-methyluridine-3'-phosphate
  modified_base 13: mod_base = OTHER; note = 2'-O-methylguanosine-3'-phosphate
  modified_base 14: mod_base = OTHER; note = 2'-O-methyladenosine-3'-phosphate
  modified_base 15: mod_base = OTHER; note = 2'-O-methylguanosine-3'-phosphate
  modified_base 16: mod_base = OTHER; note = 2'-O-methyladenosine-3'-phosphate
  modified_base 17: mod_base = OTHER; note = 2'-O-methylguanosine-3'-phosphate
  modified_base 18: mod_base = OTHER; note = 2'-O-methylguanosine-3'-phosphate
  modified_base 19: mod_base = OTHER; note = 2'-O-methylguanosine-3'-phosphate
  modified_base 20: mod_base = OTHER; note = 2'-O-methyladenosine-3'-phosphate
  modified_base 21: mod_base = OTHER; note = 2'-O-methyladenosine-3'-phosphate N-[tris(GalNAc-alkyl)-amidodecanoyl)]-4-hydroxyprolinol Hyp-(GalNAc-alkyl)3 (2S,4R)-1-[29-[[2-(acetylamino)-2-deoxy-beta-D-galactopyran osyl]oxy]-14,14-bis[[3-[[3-[[5-[[2-(acetylamino)-2-deoxy-be ta-D-galactopyranosyl]oxy]-1-oxopentyl]amino]propyl]amino]- 3-oxopropoxy]methyl]-1,12,19,25-tetraoxo-16-oxa-13,20,24-tr iazanonacos-1-yl]-4-hydroxy-2-hydroxymethylpyrrolidine
ctcttctagtctgagagggaa

SEQ ID NO: 962 - RNA, 21 nt, synthetic construct
  source 1..21: mol_type = other RNA
  modified_base 1: mod_base = OTHER; note = 2'-O-methyluridine-3'-phosphorothioate
  modified_base 2: mod_base = OTHER; note = 2'-O-methyluridine-3'-phosphorothioate
  modified_base 3: mod_base = OTHER; note = 2'-O-methylcytidine-3'-phosphate
  modified_base 4: mod_base = OTHER; note = 2'-O-methyluridine-3'-phosphate
  modified_base 5: mod_base = OTHER; note = 2'-O-methyladenosine-3'-phosphate
  modified_base 6: mod_base = OTHER; note = 2'-O-hexadecyl-guanosine-3'-phosphate
  modified_base 7: mod_base = OTHER; note = 2'-fluorouridine-3'-phosphate
  modified_base 8: mod_base = OTHER; note = 2'-O-methylcytidine-3'-phosphate
  modified_base 9: mod_base = OTHER; note = 2'-fluorouridine-3'-phosphate
  modified_base 10: mod_base = OTHER; note = 2'-fluoroguanosine-3'-phosphate
  modified_base 11: mod_base = OTHER; note = 2'-fluoroadenosine-3'-phosphate
  modified_base 12: mod_base = OTHER; note = 2'-O-methylguanosine-3'-phosphate
  modified_base 13: mod_base = OTHER; note = 2'-O-methyladenosine-3'-phosphate
  modified_base 14: mod_base = OTHER; note = 2'-O-methylguanosine-3'-phosphate
  modified_base 15: mod_base = OTHER; note = 2'-O-methylguanosine-3'-phosphate
  modified_base 16: mod_base = OTHER; note = 2'-O-methylguanosine-3'-phosphate
  modified_base 17: mod_base = OTHER; note = 2'-O-methyladenosine-3'-phosphate
  modified_base 18: mod_base = OTHER; note = 2'-O-methyladenosine-3'-phosphate
  modified_base 19: mod_base = OTHER; note = 2'-O-methylguanosine-3'-phosphate
  modified_base 20: mod_base = OTHER; note = 2'-O-methyladenosine-3'-phosphate
  modified_base 21: mod_base = OTHER; note = 2'-O-methyladenosine-3'-phosphate N-[tris(GalNAc-alkyl)-amidodecanoyl)]-4-hydroxyprolinol Hyp-(GalNAc-alkyl)3 (2S,4R)-1-[29-[[2-(acetylamino)-2-deoxy-beta-D-galactopyran osyl]oxy]-14,14-bis[[3-[[3-[[5-[[2-(acetylamino)-2-deoxy-be ta-D-galactopyranosyl]oxy]-1-oxopentyl]amino]propyl]amino]- 3-oxopropoxy]methyl]-1,12,19,25-tetraoxo-16-oxa-13,20,24-tr iazanonacos-1-yl]-4-hydroxy-2-hydroxymethylpyrrolidine
ttctagtctgagagggaagaa

SEQ ID NO: 963 - RNA, 21 nt, synthetic construct
  source 1..21: mol_type = other RNA
  modified_base 1: mod_base = OTHER; note = 2'-O-methyladenosine-3'- phosphorothioate
  modified_base 2: mod_base = OTHER; note = 2'-O-methylguanosine-3'- phosphorothioate
  modified_base 3: mod_base = OTHER; note = 2'-O-methyluridine-3'-phosphate
  modified_base 4: mod_base = OTHER; note = 2'-O-methylcytidine-3'-phosphate
  modified_base 5: mod_base = OTHER; note = 2'-O-methyluridine-3'-phosphate
  modified_base 6: mod_base = OTHER; note = 2'-O-hexadecyl-guanosine-3'-phosphate
  modified_base 7: mod_base = OTHER; note = 2'-fluoroadenosine-3'-phosphate
  modified_base 8: mod_base = OTHER; note = 2'-O-methylguanosine-3'-phosphate
  modified_base 9: mod_base = OTHER; note = 2'-fluoroadenosine-3'-phosphate
  modified_base 10: mod_base = OTHER; note = 2'-fluoroguanosine-3'-phosphate
  modified_base 11: mod_base = OTHER; note = 2'-fluoroguanosine-3'-phosphate
  modified_base 12: mod_base = OTHER; note = 2'-O-methylguanosine-3'-phosphate
  modified_base 13: mod_base = OTHER; note = 2'-O-methyladenosine-3'-phosphate
  modified_base 14: mod_base = OTHER; note = 2'-O-methyladenosine-3'-phosphate
  modified_base 15: mod_base = OTHER; note = 2'-O-methylguanosine-3'-phosphate
  modified_base 16: mod_base = OTHER; note = 2'-O-methyladenosine-3'-phosphate
  modified_base 17: mod_base = OTHER; note = 2'-O-methylguanosine-3'-phosphate
  modified_base 18: mod_base = OTHER; note = 2'-O-methylguanosine-3'-phosphate
  modified_base 19: mod_base = OTHER; note = 2'-O-methylguanosine-3'-phosphate
  modified_base 20: mod_base = OTHER; note = 2'-O-methylcytidine-3'-phosphate
  modified_base 21: mod_base = OTHER; note = 2'-O-methyladenosine-3'-phosphate N-[tris(GalNAc-alkyl)-amidodecanoyl)]-4-hydroxyprolinol Hyp-(GalNAc-alkyl)3 (2S,4R)-1-[29-[[2-(acetylamino)-2-deoxy-beta-D-galactopyran osyl]oxy]-14,14-bis[[3-[[3-[[5-[[2-(acetylamino)-2-deoxy-be ta-D-galactopyranosyl]oxy]-1-oxopentyl]amino]propyl]amino]- 3-oxopropoxy]methyl]-1,12,19,25-tetraoxo-16-oxa-13,20,24-tr iazanonacos-1-yl]-4-hydroxy-2-hydroxymethylpyrrolidine
agtctgagagggaagagggca

SEQ ID NO: 964 - RNA, 21 nt, synthetic construct
  source 1..21: mol_type = other RNA
  modified_base 1: mod_base = OTHER; note = 2'-O-methyladenosine-3'- phosphorothioate
  modified_base 2: mod_base = OTHER; note = 2'-O-methylguanosine-3'- phosphorothioate
  modified_base 3: mod_base = OTHER; note = 2'-O-methylguanosine-3'-phosphate
  modified_base 4: mod_base = OTHER; note = 2'-O-methylguanosine-3'-phosphate
  modified_base 5: mod_base = OTHER; note = 2'-O-methylcytidine-3'-phosphate
  modified_base 6: mod_base = OTHER; note = 2'-O-hexadecyl-guanosine-3'-phosphate
  modified_base 7: mod_base = OTHER; note = 2'-fluorocytidine-3'-phosphate
  modified_base 8: mod_base = OTHER; note = 2'-O-methylguanosine-3'-phosphate
  modified_base 9: mod_base = OTHER; note = 2'-fluorouridine-3'-phosphate
  modified_base 10: mod_base = OTHER; note = 2'-fluorocytidine-3'-phosphate
  modified_base 11: mod_base = OTHER; note = 2'-fluorocytidine-3'-phosphate
  modified_base 12: mod_base = OTHER; note = 2'-O-methyladenosine-3'-phosphate
  modified_base 13: mod_base = OTHER; note = 2'-O-methyladenosine-3'-phosphate
  modified_base 14: mod_base = OTHER; note = 2'-O-methyluridine-3'-phosphate
  modified_base 15: mod_base = OTHER; note = 2'-O-methylguanosine-3'-phosphate
  modified_base 16: mod_base = OTHER; note = 2'-O-methylguanosine-3'-phosphate
  modified_base 17: mod_base = OTHER; note = 2'-O-methylguanosine-3'-phosphate
  modified_base 18: mod_base = OTHER; note = 2'-O-methyladenosine-3'-phosphate
  modified_base 19: mod_base = OTHER; note = 2'-O-methylguanosine-3'-phosphate
  modified_base 20: mod_base = OTHER; note = 2'-O-methyladenosine-3'-phosphate
  modified_base 21: mod_base = OTHER; note = 2'-O-methyladenosine-3'-phosphate N-[tris(GalNAc-alkyl)-amidodecanoyl)]-4-hydroxyprolinol Hyp-(GalNAc-alkyl)3 (2S,4R)-1-[29-[[2-(acetylamino)-2-deoxy-beta-D-galactopyran osyl]oxy]-14,14-bis[[3-[[3-[[5-[[2-(acetylamino)-2-deoxy-be ta-D-galactopyranosyl]oxy]-1-oxopentyl]amino]propyl]amino]- 3-oxopropoxy]methyl]-1,12,19,25-tetraoxo-16-oxa-13,20,24-tr iazanonacos-1-yl]-4-hydroxy-2-hydroxymethylpyrrolidine
agggcgcgtccaatgggagaa

SEQ ID NO: 965 - RNA, 21 nt, synthetic construct
  source 1..21: mol_type = other RNA
  modified_base 1: mod_base = OTHER; note = 2'-O-methylguanosine-3'- phosphorothioate
  modified_base 2: mod_base = OTHER; note = 2'-O-methylguanosine-3'- phosphorothioate
  modified_base 3: mod_base = OTHER; note = 2'-O-methylguanosine-3'-phosphate
  modified_base 4: mod_base = OTHER; note = 2'-O-methylcytidine-3'-phosphate
  modified_base 5: mod_base = OTHER; note = 2'-O-methylguanosine-3'-phosphate
  modified_base 6: mod_base = OTHER; note = 2'-O-hexadecyl-cytidine-3'-phosphate
  modified_base 7: mod_base = OTHER; note = 2'-fluoroguanosine-3'-phosphate
  modified_base 8: mod_base = OTHER; note = 2'-O-methyluridine-3'-phosphate
  modified_base 9: mod_base = OTHER; note = 2'-fluorocytidine-3'-phosphate
  modified_base 10: mod_base = OTHER; note = 2'-fluorocytidine-3'-phosphate
  modified_base 11: mod_base = OTHER; note = 2'-fluoroadenosine-3'-phosphate
  modified_base 12: mod_base = OTHER; note = 2'-O-methyladenosine-3'-phosphate
  modified_base 13: mod_base = OTHER; note = 2'-O-methyluridine-3'-phosphate
  modified_base 14: mod_base = OTHER; note = 2'-O-methylguanosine-3'-phosphate
  modified_base 15: mod_base = OTHER; note = 2'-O-methylguanosine-3'-phosphate
  modified_base 16: mod_base = OTHER; note = 2'-O-methylguanosine-3'-phosphate
  modified_base 17: mod_base = OTHER; note = 2'-O-methyladenosine-3'-phosphate
  modified_base 18: mod_base = OTHER; note = 2'-O-methylguanosine-3'-phosphate
  modified_base 19: mod_base = OTHER; note = 2'-O-methyladenosine-3'-phosphate
  modified_base 20: mod_base = OTHER; note = 2'-O-methyluridine-3'-phosphate
  modified_base 21: mod_base = OTHER; note = 2'-O-methyladenosine-3'-phosphate N-[tris(GalNAc-alkyl)-amidodecanoyl)]-4-hydroxyprolinol Hyp-(GalNAc-alkyl)3 (2S,4R)-1-[29-[[2-(acetylamino)-2-deoxy-beta-D-galactopyran osyl]oxy]-14,14-bis[[3-[[3-[[5-[[2-(acetylamino)-2-deoxy-be ta-D-galactopyranosyl]oxy]-1-oxopentyl]amino]propyl]amino]- 3-oxopropoxy]methyl]-1,12,19,25-tetraoxo-16-oxa-13,20,24-tr iazanonacos-1-yl]-4-hydroxy-2-hydroxymethylpyrrolidine
gggcgcgtccaatgggagata

SEQ ID NO: 966 - RNA, 21 nt, synthetic construct
  source 1..21: mol_type = other RNA
  modified_base 1: mod_base = OTHER; note = 2'-O-methylguanosine-3'- phosphorothioate
  modified_base 2: mod_base = OTHER; note = 2'-O-methylguanosine-3'- phosphorothioate
  modified_base 3: mod_base = OTHER; note = 2'-O-methylcytidine-3'-phosphate
  modified_base 4: mod_base = OTHER; note = 2'-O-methylguanosine-3'-phosphate
  modified_base 5: mod_base = OTHER; note = 2'-O-methylcytidine-3'-phosphate
  modified_base 6: mod_base = OTHER; note = 2'-O-hexadecyl-guanosine-3'-phosphate
  modified_base 7: mod_base = OTHER; note = 2'-fluorouridine-3'-phosphate
  modified_base 8: mod_base = OTHER; note = 2'-O-methylcytidine-3'-phosphate
  modified_base 9: mod_base = OTHER; note = 2'-fluorocytidine-3'-phosphate
  modified_base 10: mod_base = OTHER; note = 2'-fluoroadenosine-3'-phosphate
  modified_base 11: mod_base = OTHER; note = 2'-fluoroadenosine-3'-phosphate
  modified_base 12: mod_base = OTHER; note = 2'-O-methyluridine-3'-phosphate
  modified_base 13: mod_base = OTHER; note = 2'-O-methylguanosine-3'-phosphate
  modified_base 14: mod_base = OTHER; note = 2'-O-methylguanosine-3'-phosphate
  modified_base 15: mod_base = OTHER; note = 2'-O-methylguanosine-3'-phosphate
  modified_base 16: mod_base = OTHER; note = 2'-O-methyladenosine-3'-phosphate
  modified_base 17: mod_base = OTHER; note = 2'-O-methylguanosine-3'-phosphate
  modified_base 18: mod_base = OTHER; note = 2'-O-methyladenosine-3'-phosphate
  modified_base 19: mod_base = OTHER; note = 2'-O-methyluridine-3'-phosphate
  modified_base 20: mod_base = OTHER; note = 2'-O-methyluridine-3'-phosphate
  modified_base 21: mod_base = OTHER; note = 2'-O-methyladenosine-3'-phosphate N-[tris(GalNAc-alkyl)-amidodecanoyl)]-4-hydroxyprolinol Hyp-(GalNAc-alkyl)3 (2S,4R)-1-[29-[[2-(acetylamino)-2-deoxy-beta-D-galactopyran osyl]oxy]-14,14-bis[[3-[[3-[[5-[[2-(acetylamino)-2-deoxy-be ta-D-galactopyranosyl]oxy]-1-oxopentyl]amino]propyl]amino]- 3-oxopropoxy]methyl]-1,12,19,25-tetraoxo-16-oxa-13,20,24-tr iazanonacos-1-yl]-4-hydroxy-2-hydroxymethylpyrrolidine
ggcgcgtccaatgggagatta

SEQ ID NO: 967 - RNA, 21 nt, synthetic construct
  source 1..21: mol_type = other RNA
  modified_base 1: mod_base = OTHER; note = 2'-O-methylcytidine-3'- phosphorothioate
  modified_base 2: mod_base = OTHER; note = 2'-O-methylguanosine-3'- phosphorothioate
  modified_base 3: mod_base = OTHER; note = 2'-O-methylcytidine-3'-phosphate
  modified_base 4: mod_base = OTHER; note = 2'-O-methylguanosine-3'-phosphate
  modified_base 5: mod_base = OTHER; note = 2'-O-methyluridine-3'-phosphate
  modified_base 6: mod_base = OTHER; note = 2'-O-hexadecyl-cytidine-3'-phosphate
  modified_base 7: mod_base = OTHER; note = 2'-fluorocytidine-3'-phosphate
  modified_base 8: mod_base = OTHER; note = 2'-O-methyladenosine-3'-phosphate
  modified_base 9: mod_base = OTHER; note = 2'-fluoroadenosine-3'-phosphate
  modified_base 10: mod_base = OTHER; note = 2'-fluorouridine-3'-phosphate
  modified_base 11: mod_base = OTHER; note = 2'-fluoroguanosine-3'-phosphate
  modified_base 12: mod_base = OTHER; note = 2'-O-methylguanosine-3'-phosphate
  modified_base 13: mod_base = OTHER; note = 2'-O-methylguanosine-3'-phosphate
  modified_base 14: mod_base = OTHER; note = 2'-O-methyladenosine-3'-phosphate
  modified_base 15: mod_base = OTHER; note = 2'-O-methylguanosine-3'-phosphate
  modified_base 16: mod_base = OTHER; note = 2'-O-methyladenosine-3'-phosphate
  modified_base 17: mod_base = OTHER; note = 2'-O-methyluridine-3'-phosphate
  modified_base 18: mod_base = OTHER; note = 2'-O-methyluridine-3'-phosphate
  modified_base 19: mod_base = OTHER; note = 2'-O-methyluridine-3'-phosphate
  modified_base 20: mod_base = OTHER; note = 2'-O-methylcytidine-3'-phosphate
  modified_base 21: mod_base = OTHER; note = 2'-O-methyladenosine-3'-phosphate N-[tris(GalNAc-alkyl)-amidodecanoyl)]-4-hydroxyprolinol Hyp-(GalNAc-alkyl)3 (2S,4R)-1-[29-[[2-(acetylamino)-2-deoxy-beta-D-galactopyran osyl]oxy]-14,14-bis[[3-[[3-[[5-[[2-(acetylamino)-2-deoxy-be ta-D-galactopyranosyl]oxy]-1-oxopentyl]amino]propyl]amino]- 3-oxopropoxy]methyl]-1,12,19,25-tetraoxo-16-oxa-13,20,24-tr iazanonacos-1-yl]-4-hydroxy-2-hydroxymethylpyrrolidine
cgcgtccaatgggagatttca

SEQ ID NO: 968 - RNA, 21 nt, synthetic construct
  source 1..21: mol_type = other RNA
  modified_base 1: mod_base = OTHER; note = 2'-O-methyladenosine-3'- phosphorothioate
  modified_base 2: mod_base = OTHER; note = 2'-O-methylcytidine-3'- phosphorothioate
  modified_base 3: mod_base = OTHER; note = 2'-O-methyladenosine-3'-phosphate
  modified_base 4: mod_base = OTHER; note = 2'-O-methylguanosine-3'-phosphate
  modified_base 5: mod_base = OTHER; note = 2'-O-methylcytidine-3'-phosphate
  modified_base 6: mod_base = OTHER; note = 2'-O-hexadecyl-cytidine-3'-phosphate
  modified_base 7: mod_base = OTHER; note = 2'-fluorouridine-3'-phosphate
  modified_base 8: mod_base = OTHER; note = 2'-O-methylguanosine-3'-phosphate
  modified_base 9: mod_base = OTHER; note = 2'-fluoroadenosine-3'-phosphate
  modified_base 10: mod_base = OTHER; note = 2'-fluoroguanosine-3'-phosphate
  modified_base 11: mod_base = OTHER; note = 2'-fluoroadenosine-3'-phosphate
  modified_base 12: mod_base = OTHER; note = 2'-O-methyluridine-3'-phosphate
  modified_base 13: mod_base = OTHER; note = 2'-O-methyluridine-3'-phosphate
  modified_base 14: mod_base = OTHER; note = 2'-O-methyluridine-3'-phosphate
  modified_base 15: mod_base = OTHER; note = 2'-O-methylguanosine-3'-phosphate
  modified_base 16: mod_base = OTHER; note = 2'-O-methyladenosine-3'-phosphate
  modified_base 17: mod_base = OTHER; note = 2'-O-methylguanosine-3'-phosphate
  modified_base 18: mod_base = OTHER; note = 2'-O-methylguanosine-3'-phosphate
  modified_base 19: mod_base = OTHER; note = 2'-O-methylcytidine-3'-phosphate
  modified_base 20: mod_base = OTHER; note = 2'-O-methyluridine-3'-phosphate
  modified_base 21: mod_base = OTHER; note = 2'-O-methyladenosine-3'-phosphate N-[tris(GalNAc-alkyl)-amidodecanoyl)]-4-hydroxyprolinol Hyp-(GalNAc-alkyl)3 (2S,4R)-1-[29-[[2-(acetylamino)-2-deoxy-beta-D-galactopyran osyl]oxy]-14,14-bis[[3-[[3-[[5-[[2-(acetylamino)-2-deoxy-be ta-D-galactopyranosyl]oxy]-1-oxopentyl]amino]propyl]amino]- 3-oxopropoxy]methyl]-1,12,19,25-tetraoxo-16-oxa-13,20,24-tr iazanonacos-1-yl]-4-hydroxy-2-hydroxymethylpyrrolidine
acagcctgagatttgaggcta

SEQ ID NO: 969 - RNA, 21 nt, synthetic construct
  source 1..21: mol_type = other RNA
  modified_base 1: mod_base = OTHER; note = 2'-O-methyladenosine-3'- phosphorothioate
  modified_base 2: mod_base = OTHER; note = 2'-O-methylguanosine-3'- phosphorothioate
  modified_base 3: mod_base = OTHER; note = 2'-O-methylcytidine-3'-phosphate
  modified_base 4: mod_base = OTHER; note = 2'-O-methylcytidine-3'-phosphate
  modified_base 5: mod_base = OTHER; note = 2'-O-methyluridine-3'-phosphate
  modified_base 6: mod_base = OTHER; note = 2'-O-hexadecyl-guanosine-3'-phosphate
  modified_base 7: mod_base = OTHER; note = 2'-fluoroadenosine-3'-phosphate
  modified_base 8: mod_base = OTHER; note = 2'-O-methylguanosine-3'-phosphate
  modified_base 9: mod_base = OTHER; note = 2'-fluoroadenosine-3'-phosphate
  modified_base 10: mod_base = OTHER; note = 2'-fluorouridine-3'-phosphate
  modified_base 11: mod_base = OTHER; note = 2'-fluorouridine-3'-phosphate
  modified_base 12: mod_base = OTHER; note = 2'-O-methyluridine-3'-phosphate
  modified_base 13: mod_base = OTHER; note = 2'-O-methylguanosine-3'-phosphate
  modified_base 14: mod_base = OTHER; note = 2'-O-methyladenosine-3'-phosphate
  modified_base 15: mod_base = OTHER; note = 2'-O-methylguanosine-3'-phosphate
  modified_base 16: mod_base = OTHER; note = 2'-O-methylguanosine-3'-phosphate
  modified_base 17: mod_base = OTHER; note = 2'-O-methylcytidine-3'-phosphate
  modified_base 18: mod_base = OTHER; note = 2'-O-methyluridine-3'-phosphate
  modified_base 19: mod_base = OTHER; note = 2'-O-methylcytidine-3'-phosphate
  modified_base 20: mod_base = OTHER; note = 2'-O-methyluridine-3'-phosphate
  modified_base 21: mod_base = OTHER; note = 2'-O-methyladenosine-3'-phosphate N-[tris(GalNAc-alkyl)-amidodecanoyl)]-4-hydroxyprolinol Hyp-(GalNAc-alkyl)3 (2S,4R)-1-[29-[[2-(acetylamino)-2-deoxy-beta-D-galactopyran osyl]oxy]-14,14-bis[[3-[[3-[[5-[[2-(acetylamino)-2-deoxy-be ta-D-galactopyranosyl]oxy]-1-oxopentyl]amino]propyl]amino]- 3-oxopropoxy]methyl]-1,12,19,25-tetraoxo-16-oxa-13,20,24-tr iazanonacos-1-yl]-4-hydroxy-2-hydroxymethylpyrrolidine
agcctgagatttgaggctcta

SEQ ID NO: 970 - RNA, 21 nt, synthetic construct
  source 1..21: mol_type = other RNA
  modified_base 1: mod_base = OTHER; note = 2'-O-methylguanosine-3'- phosphorothioate
  modified_base 2: mod_base = OTHER; note = 2'-O-methylcytidine-3'- phosphorothioate
  modified_base 3: mod_base = OTHER; note = 2'-O-methylcytidine-3'-phosphate
  modified_base 4: mod_base = OTHER; note = 2'-O-methyluridine-3'-phosphate
  modified_base 5: mod_base = OTHER; note = 2'-O-methylguanosine-3'-phosphate
  modified_base 6: mod_base = OTHER; note = 2'-O-hexadecyl-adenosine-3'-phosphate
  modified_base 7: mod_base = OTHER; note = 2'-fluoroguanosine-3'-phosphate
  modified_base 8: mod_base = OTHER; note = 2'-O-methyladenosine-3'-phosphate
  modified_base 9: mod_base = OTHER; note = 2'-fluorouridine-3'-phosphate
  modified_base 10: mod_base = OTHER; note = 2'-fluorouridine-3'-phosphate
  modified_base 11: mod_base = OTHER; note = 2'-fluorouridine-3'-phosphate
  modified_base 12: mod_base = OTHER; note = 2'-O-methylguanosine-3'-phosphate
  modified_base 13: mod_base = OTHER; note = 2'-O-methyladenosine-3'-phosphate
  modified_base 14: mod_base = OTHER; note = 2'-O-methylguanosine-3'-phosphate
  modified_base 15: mod_base = OTHER; note = 2'-O-methylguanosine-3'-phosphate
  modified_base 16: mod_base = OTHER; note = 2'-O-methylcytidine-3'-phosphate
  modified_base 17: mod_base = OTHER; note = 2'-O-methyluridine-3'-phosphate
  modified_base 18: mod_base = OTHER; note = 2'-O-methylcytidine-3'-phosphate
  modified_base 19: mod_base = OTHER; note = 2'-O-methyluridine-3'-phosphate
  modified_base 20: mod_base = OTHER; note = 2'-O-methyluridine-3'-phosphate
  modified_base 21: mod_base = OTHER; note = 2'-O-methyladenosine-3'-phosphate N-[tris(GalNAc-alkyl)-amidodecanoyl)]-4-hydroxyprolinol Hyp-(GalNAc-alkyl)3 (2S,4R)-1-[29-[[2-(acetylamino)-2-deoxy-beta-D-galactopyran osyl]oxy]-14,14-bis[[3-[[3-[[5-[[2-(acetylamino)-2-deoxy-be ta-D-galactopyranosyl]oxy]-1-oxopentyl]amino]propyl]amino]- 3-oxopropoxy]methyl]-1,12,19,25-tetraoxo-16-oxa-13,20,24-tr iazanonacos-1-yl]-4-hydroxy-2-hydroxymethylpyrrolidine
gcctgagatttgaggctctta

SEQ ID NO: 971 - RNA, 21 nt, synthetic construct
  source 1..21: mol_type = other RNA
  modified_base 1: mod_base = OTHER; note = 2'-O-methylcytidine-3'- phosphorothioate
  modified_base 2: mod_base = OTHER; note = 2'-O-methylcytidine-3'- phosphorothioate
  modified_base 3: mod_base = OTHER; note = 2'-O-methyluridine-3'-phosphate
  modified_base 4: mod_base = OTHER; note = 2'-O-methylguanosine-3'-phosphate
  modified_base 5: mod_base = OTHER; note = 2'-O-methyladenosine-3'-phosphate
  modified_base 6: mod_base = OTHER; note = 2'-O-hexadecyl-guanosine-3'-phosphate
  modified_base 7: mod_base = OTHER; note = 2'-fluoroadenosine-3'-phosphate
  modified_base 8: mod_base = OTHER; note = 2'-O-methyluridine-3'-phosphate
  modified_base 9: mod_base = OTHER; note = 2'-fluorouridine-3'-phosphate
  modified_base 10: mod_base = OTHER; note = 2'-fluorouridine-3'-phosphate
  modified_base 11: mod_base = OTHER; note = 2'-fluoroguanosine-3'-phosphate
  modified_base 12: mod_base = OTHER; note = 2'-O-methyladenosine-3'-phosphate
  modified_base 13: mod_base = OTHER; note = 2'-O-methylguanosine-3'-phosphate
  modified_base 14: mod_base = OTHER; note = 2'-O-methylguanosine-3'-phosphate
  modified_base 15: mod_base = OTHER; note = 2'-O-methylcytidine-3'-phosphate
  modified_base 16: mod_base = OTHER; note = 2'-O-methyluridine-3'-phosphate
  modified_base 17: mod_base = OTHER; note = 2'-O-methylcytidine-3'-phosphate
  modified_base 18: mod_base = OTHER; note = 2'-O-methyluridine-3'-phosphate
  modified_base 19: mod_base = OTHER; note = 2'-O-methyluridine-3'-phosphate
  modified_base 20: mod_base = OTHER; note = 2'-O-methylcytidine-3'-phosphate
  modified_base 21: mod_base = OTHER; note = 2'-O-methyladenosine-3'-phosphate N-[tris(GalNAc-alkyl)-amidodecanoyl)]-4-hydroxyprolinol Hyp-(GalNAc-alkyl)3 (2S,4R)-1-[29-[[2-(acetylamino)-2-deoxy-beta-D-galactopyran osyl]oxy]-14,14-bis[[3-[[3-[[5-[[2-(acetylamino)-2-deoxy-be ta-D-galactopyranosyl]oxy]-1-oxopentyl]amino]propyl]amino]- 3-oxopropoxy]methyl]-1,12,19,25-tetraoxo-16-oxa-13,20,24-tr iazanonacos-1-yl]-4-hydroxy-2-hydroxymethylpyrrolidine
cctgagatttgaggctcttca

SEQ ID NO: 972 - RNA, 21 nt, synthetic construct
  source 1..21: mol_type = other RNA
  modified_base 1: mod_base = OTHER; note = 2'-O-methylguanosine-3'- phosphorothioate
  modified_base 2: mod_base = OTHER; note = 2'-O-methyladenosine-3'- phosphorothioate
  modified_base 3: mod_base = OTHER; note = 2'-O-methyluridine-3'-phosphate
  modified_base 4: mod_base = OTHER; note = 2'-O-methyluridine-3'-phosphate
  modified_base 5: mod_base = OTHER; note = 2'-O-methyluridine-3'-phosphate
  modified_base 6: mod_base = OTHER; note = 2'-O-hexadecyl-guanosine-3'-phosphate
  modified_base 7: mod_base = OTHER; note = 2'-fluoroadenosine-3'-phosphate
  modified_base 8: mod_base = OTHER; note = 2'-O-methylguanosine-3'-phosphate
  modified_base 9: mod_base = OTHER; note = 2'-fluoroguanosine-3'-phosphate
  modified_base 10: mod_base = OTHER; note = 2'-fluorocytidine-3'-phosphate
  modified_base 11: mod_base = OTHER; note = 2'-fluorouridine-3'-phosphate
  modified_base 12: mod_base = OTHER; note = 2'-O-methylcytidine-3'-phosphate
  modified_base 13: mod_base = OTHER; note = 2'-O-methyluridine-3'-phosphate
  modified_base 14: mod_base = OTHER; note = 2'-O-methyluridine-3'-phosphate
  modified_base 15: mod_base = OTHER; note = 2'-O-methylcytidine-3'-phosphate
  modified_base 16: mod_base = OTHER; note = 2'-O-methylcytidine-3'-phosphate
  modified_base 17: mod_base = OTHER; note = 2'-O-methyluridine-3'-phosphate
  modified_base 18: mod_base = OTHER; note = 2'-O-methyladenosine-3'-phosphate
  modified_base 19: mod_base = OTHER; note = 2'-O-methylcytidine-3'-phosphate
  modified_base 20: mod_base = OTHER; note = 2'-O-methyladenosine-3'-phosphate
  modified_base 21: mod_base = OTHER; note = 2'-O-methyladenosine-3'-phosphate N-[tris(GalNAc-alkyl)-amidodecanoyl)]-4-hydroxyprolinol Hyp-(GalNAc-alkyl)3 (2S,4R)-1-[29-[[2-(acetylamino)-2-deoxy-beta-D-galactopyran osyl]oxy]-14,14-bis[[3-[[3-[[5-[[2-(acetylamino)-2-deoxy-be ta-D-galactopyranosyl]oxy]-1-oxopentyl]amino]propyl]amino]- 3-oxopropoxy]methyl]-1,12,19,25-tetraoxo-16-oxa-13,20,24-tr iazanonacos-1-yl]-4-hydroxy-2-hydroxymethylpyrrolidine
gatttgaggctcttcctacaa

SEQ ID NO: 973 - RNA, 21 nt, synthetic construct
  source 1..21: mol_type = other RNA
  modified_base 1: mod_base = OTHER; note = 2'-O-methyladenosine-3'- phosphorothioate
  modified_base 2: mod_base = OTHER; note = 2'-O-methyluridine-3'-phosphorothioate
  modified_base 3: mod_base = OTHER; note = 2'-O-methyluridine-3'-phosphate
  modified_base 4: mod_base = OTHER; note = 2'-O-methyluridine-3'-phosphate
  modified_base 5: mod_base = OTHER; note = 2'-O-methylguanosine-3'-phosphate
  modified_base 6: mod_base = OTHER; note = 2'-O-hexadecyl-adenosine-3'-phosphate
  modified_base 7: mod_base = OTHER; note = 2'-fluoroguanosine-3'-phosphate
  modified_base 8: mod_base = OTHER; note = 2'-O-methylguanosine-3'-phosphate
  modified_base 9: mod_base = OTHER; note = 2'-fluorocytidine-3'-phosphate
  modified_base 10: mod_base = OTHER; note = 2'-fluorouridine-3'-phosphate
  modified_base 11: mod_base = OTHER; note = 2'-fluorocytidine-3'-phosphate
  modified_base 12: mod_base = OTHER; note = 2'-O-methyluridine-3'-phosphate
  modified_base 13: mod_base = OTHER; note = 2'-O-methyluridine-3'-phosphate
  modified_base 14: mod_base = OTHER; note = 2'-O-methylcytidine-3'-phosphate
  modified_base 15: mod_base = OTHER; note = 2'-O-methylcytidine-3'-phosphate
  modified_base 16: mod_base = OTHER; note = 2'-O-methyluridine-3'-phosphate
  modified_base 17: mod_base = OTHER; note = 2'-O-methyladenosine-3'-phosphate
  modified_base 18: mod_base = OTHER; note = 2'-O-methylcytidine-3'-phosphate
  modified_base 19: mod_base = OTHER; note = 2'-O-methyladenosine-3'-phosphate
  modified_base 20: mod_base = OTHER; note = 2'-O-methyluridine-3'-phosphate
  modified_base 21: mod_base = OTHER; note = 2'-O-methyladenosine-3'-phosphate N-[tris(GalNAc-alkyl)-amidodecanoyl)]-4-hydroxyprolinol Hyp-(GalNAc-alkyl)3 (2S,4R)-1-[29-[[2-(acetylamino)-2-deoxy-beta-D-galactopyran osyl]oxy]-14,14-bis[[3-[[3-[[5-[[2-(acetylamino)-2-deoxy-be ta-D-galactopyranosyl]oxy]-1-oxopentyl]amino]propyl]amino]- 3-oxopropoxy]methyl]-1,12,19,25-tetraoxo-16-oxa-13,20,24-tr iazanonacos-1-yl]-4-hydroxy-2-hydroxymethylpyrrolidine
atttgaggctcttcctacata

SEQ ID NO: 974 - RNA, 21 nt, synthetic construct
  source 1..21: mol_type = other RNA
  modified_base 1: mod_base = OTHER; note = 2'-O-methyluridine-3'-phosphorothioate
  modified_base 2: mod_base = OTHER; note = 2'-O-methylcytidine-3'- phosphorothioate
  modified_base 3: mod_base = OTHER; note = 2'-O-methyluridine-3'-phosphate
  modified_base 4: mod_base = OTHER; note = 2'-O-methyluridine-3'-phosphate
  modified_base 5: mod_base = OTHER; note = 2'-O-methylcytidine-3'-phosphate
  modified_base 6: mod_base = OTHER; note = 2'-O-hexadecyl-cytidine-3'-phosphate
  modified_base 7: mod_base = OTHER; note = 2'-fluorouridine-3'-phosphate
  modified_base 8: mod_base = OTHER; note = 2'-O-methyladenosine-3'-phosphate
  modified_base 9: mod_base = OTHER; note = 2'-fluorocytidine-3'-phosphate
  modified_base 10: mod_base = OTHER; note = 2'-fluoroadenosine-3'-phosphate
  modified_base 11: mod_base = OTHER; note = 2'-fluorouridine-3'-phosphate
  modified_base 12: mod_base = OTHER; note = 2'-O-methyluridine-3'-phosphate
  modified_base 13: mod_base = OTHER; note = 2'-O-methylguanosine-3'-phosphate
  modified_base 14: mod_base = OTHER; note = 2'-O-methyluridine-3'-phosphate
  modified_base 15: mod_base = OTHER; note = 2'-O-methylcytidine-3'-phosphate
  modified_base 16: mod_base = OTHER; note = 2'-O-methyladenosine-3'-phosphate
  modified_base 17: mod_base = OTHER; note = 2'-O-methylguanosine-3'-phosphate
  modified_base 18: mod_base = OTHER; note = 2'-O-methylguanosine-3'-phosphate
  modified_base 19: mod_base = OTHER; note = 2'-O-methyladenosine-3'-phosphate
  modified_base 20: mod_base = OTHER; note = 2'-O-methylcytidine-3'-phosphate
  modified_base 21: mod_base = OTHER; note = 2'-O-methyladenosine-3'-phosphate N-[tris(GalNAc-alkyl)-amidodecanoyl)]-4-hydroxyprolinol Hyp-(GalNAc-alkyl)3 (2S,4R)-1-[29-[[2-(acetylamino)-2-deoxy-beta-D-galactopyran osyl]oxy]-14,14-bis[[3-[[3-[[5-[[2-(acetylamino)-2-deoxy-be ta-D-galactopyranosyl]oxy]-1-oxopentyl]amino]propyl]amino]- 3-oxopropoxy]methyl]-1,12,19,25-tetraoxo-16-oxa-13,20,24-tr iazanonacos-1-yl]-4-hydroxy-2-hydroxymethylpyrrolidine
tcttcctacattgtcaggaca

SEQ ID NO: 975 - RNA, 21 nt, synthetic construct
  source 1..21: mol_type = other RNA
  modified_base 1: mod_base = OTHER; note = 2'-O-methyluridine-3'-phosphorothioate
  modified_base 2: mod_base = OTHER; note = 2'-O-methyluridine-3'-phosphorothioate
  modified_base 3: mod_base = OTHER; note = 2'-O-methylcytidine-3'-phosphate
  modified_base 4: mod_base = OTHER; note = 2'-O-methylcytidine-3'-phosphate
  modified_base 5: mod_base = OTHER; note = 2'-O-methyluridine-3'-phosphate
  modified_base 6: mod_base = OTHER; note = 2'-O-hexadecyl-adenosine-3'-phosphate
  modified_base 7: mod_base = OTHER; note = 2'-fluorocytidine-3'-phosphate
  modified_base 8: mod_base = OTHER; note = 2'-O-methyladenosine-3'-phosphate
  modified_base 9: mod_base = OTHER; note = 2'-fluorouridine-3'-phosphate
  modified_base 10: mod_base = OTHER; note = 2'-fluorouridine-3'-phosphate
  modified_base 11: mod_base = OTHER; note = 2'-fluoroguanosine-3'-phosphate
  modified_base 12: mod_base = OTHER; note = 2'-O-methyluridine-3'-phosphate
  modified_base 13: mod_base = OTHER; note = 2'-O-methylcytidine-3'-phosphate
  modified_base 14: mod_base = OTHER; note = 2'-O-methyladenosine-3'-phosphate
  modified_base 15: mod_base = OTHER; note = 2'-O-methylguanosine-3'-phosphate
  modified_base 16: mod_base = OTHER; note = 2'-O-methylguanosine-3'-phosphate
  modified_base 17: mod_base = OTHER; note = 2'-O-methyladenosine-3'-phosphate
  modified_base 18: mod_base = OTHER; note = 2'-O-methylcytidine-3'-phosphate
  modified_base 19: mod_base = OTHER; note = 2'-O-methyladenosine-3'-phosphate
  modified_base 20: mod_base = OTHER; note = 2'-O-methyluridine-3'-phosphate
  modified_base 21: mod_base = OTHER; note = 2'-O-methyladenosine-3'-phosphate N-[tris(GalNAc-alkyl)-amidodecanoyl)]-4-hydroxyprolinol Hyp-(GalNAc-alkyl)3 (2S,4R)-1-[29-[[2-(acetylamino)-2-deoxy-beta-D-galactopyran osyl]oxy]-14,14-bis[[3-[[3-[[5-[[2-(acetylamino)-2-deoxy-be ta-D-galactopyranosyl]oxy]-1-oxopentyl]amino]propyl]amino]- 3-oxopropoxy]methyl]-1,12,19,25-tetraoxo-16-oxa-13,20,24-tr iazanonacos-1-yl]-4-hydroxy-2-hydroxymethylpyrrolidine
ttcctacattgtcaggacata

SEQ ID NO: 976 - RNA, 21 nt, synthetic construct
  source 1..21: mol_type = other RNA
  modified_base 1: mod_base = OTHER; note = 2'-O-methyluridine-3'-phosphorothioate
  modified_base 2: mod_base = OTHER; note = 2'-O-methylcytidine-3'- phosphorothioate
  modified_base 3: mod_base = OTHER; note = 2'-O-methylcytidine-3'-phosphate
  modified_base 4: mod_base = OTHER; note = 2'-O-methyluridine-3'-phosphate
  modified_base 5: mod_base = OTHER; note = 2'-O-methyladenosine-3'-phosphate
  modified_base 6: mod_base = OTHER; note = 2'-O-hexadecyl-cytidine-3'-phosphate
  modified_base 7: mod_base = OTHER; note = 2'-fluoroadenosine-3'-phosphate
  modified_base 8: mod_base = OTHER; note = 2'-O-methyluridine-3'-phosphate
  modified_base 9: mod_base = OTHER; note = 2'-fluorouridine-3'-phosphate
  modified_base 10: mod_base = OTHER; note = 2'-fluoroguanosine-3'-phosphate
  modified_base 11: mod_base = OTHER; note = 2'-fluorouridine-3'-phosphate
  modified_base 12: mod_base = OTHER; note = 2'-O-methylcytidine-3'-phosphate
  modified_base 13: mod_base = OTHER; note = 2'-O-methyladenosine-3'-phosphate
  modified_base 14: mod_base = OTHER; note = 2'-O-methylguanosine-3'-phosphate
  modified_base 15: mod_base = OTHER; note = 2'-O-methylguanosine-3'-phosphate
  modified_base 16: mod_base = OTHER; note = 2'-O-methyladenosine-3'-phosphate
  modified_base 17: mod_base = OTHER; note = 2'-O-methylcytidine-3'-phosphate
  modified_base 18: mod_base = OTHER; note = 2'-O-methyladenosine-3'-phosphate
  modified_base 19: mod_base = OTHER; note = 2'-O-methyluridine-3'-phosphate
  modified_base 20: mod_base = OTHER; note = 2'-O-methyluridine-3'-phosphate
  modified_base 21: mod_base = OTHER; note = 2'-O-methyladenosine-3'-phosphate N-[tris(GalNAc-alkyl)-amidodecanoyl)]-4-hydroxyprolinol Hyp-(GalNAc-alkyl)3 (2S,4R)-1-[29-[[2-(acetylamino)-2-deoxy-beta-D-galactopyran osyl]oxy]-14,14-bis[[3-[[3-[[5-[[2-(acetylamino)-2-deoxy-be ta-D-galactopyranosyl]oxy]-1-oxopentyl]amino]propyl]amino]- 3-oxopropoxy]methyl]-1,12,19,25-tetraoxo-16-oxa-13,20,24-tr iazanonacos-1-yl]-4-hydroxy-2-hydroxymethylpyrrolidine
tcctacattgtcaggacatta

SEQ ID NO: 977 - RNA, 21 nt, synthetic construct
  source 1..21: mol_type = other RNA
  modified_base 1: mod_base = OTHER; note = 2'-O-methylcytidine-3'- phosphorothioate
  modified_base 2: mod_base = OTHER; note = 2'-O-methyluridine-3'-phosphorothioate
  modified_base 3: mod_base = OTHER; note = 2'-O-methyladenosine-3'-phosphate
  modified_base 4: mod_base = OTHER; note = 2'-O-methylcytidine-3'-phosphate
  modified_base 5: mod_base = OTHER; note = 2'-O-methyladenosine-3'-phosphate
  modified_base 6: mod_base = OTHER; note = 2'-O-hexadecyl-uridine-3'-phosphate
  modified_base 7: mod_base = OTHER; note = 2'-fluorouridine-3'-phosphate
  modified_base 8: mod_base = OTHER; note = 2'-O-methylguanosine-3'-phosphate
  modified_base 9: mod_base = OTHER; note = 2'-fluorouridine-3'-phosphate
  modified_base 10: mod_base = OTHER; note = 2'-fluorocytidine-3'-phosphate
  modified_base 11: mod_base = OTHER; note = 2'-fluoroadenosine-3'-phosphate
  modified_base 12: mod_base = OTHER; note = 2'-O-methylguanosine-3'-phosphate
  modified_base 13: mod_base = OTHER; note = 2'-O-methylguanosine-3'-phosphate
  modified_base 14: mod_base = OTHER; note = 2'-O-methyladenosine-3'-phosphate
  modified_base 15: mod_base = OTHER; note = 2'-O-methylcytidine-3'-phosphate
  modified_base 16: mod_base = OTHER; note = 2'-O-methyladenosine-3'-phosphate
  modified_base 17: mod_base = OTHER; note = 2'-O-methyluridine-3'-phosphate
  modified_base 18: mod_base = OTHER; note = 2'-O-methyluridine-3'-phosphate
  modified_base 19: mod_base = OTHER; note = 2'-O-methyluridine-3'-phosphate
  modified_base 20: mod_base = OTHER; note = 2'-O-methylcytidine-3'-phosphate
  modified_base 21: mod_base = OTHER; note = 2'-O-methyladenosine-3'-phosphate N-[tris(GalNAc-alkyl)-amidodecanoyl)]-4-hydroxyprolinol Hyp-(GalNAc-alkyl)3 (2S,4R)-1-[29-[[2-(acetylamino)-2-deoxy-beta-D-galactopyran osyl]oxy]-14,14-bis[[3-[[3-[[5-[[2-(acetylamino)-2-deoxy-be ta-D-galactopyranosyl]oxy]-1-oxopentyl]amino]propyl]amino]- 3-oxopropoxy]methyl]-1,12,19,25-tetraoxo-16-oxa-13,20,24-tr iazanonacos-1-yl]-4-hydroxy-2-hydroxymethylpyrrolidine
ctacattgtcaggacatttca

SEQ ID NO: 978 - RNA, 21 nt, synthetic construct
  source 1..21: mol_type = other RNA
  modified_base 1: mod_base = OTHER; note = 2'-O-methyluridine-3'-phosphorothioate
  modified_base 2: mod_base = OTHER; note = 2'-O-methyluridine-3'-phosphorothioate
  modified_base 3: mod_base = OTHER; note = 2'-O-methylcytidine-3'-phosphate
  modified_base 4: mod_base = OTHER; note = 2'-O-methyladenosine-3'-phosphate
  modified_base 5: mod_base = OTHER; note = 2'-O-methyluridine-3'-phosphate
  modified_base 6: mod_base = OTHER; note = 2'-O-hexadecyl-uridine-3'-phosphate
  modified_base 7: mod_base = OTHER; note = 2'-fluorouridine-3'-phosphate
  modified_base 8: mod_base = OTHER; note = 2'-O-methyladenosine-3'-phosphate
  modified_base 9: mod_base = OTHER; note = 2'-fluoroguanosine-3'-phosphate
  modified_base 10: mod_base = OTHER; note = 2'-fluorouridine-3'-phosphate
  modified_base 11: mod_base = OTHER; note = 2'-fluorouridine-3'-phosphate
  modified_base 12: mod_base = OTHER; note = 2'-O-methylcytidine-3'-phosphate
  modified_base 13: mod_base = OTHER; note = 2'-O-methyladenosine-3'-phosphate
  modified_base 14: mod_base = OTHER; note = 2'-O-methyluridine-3'-phosphate
  modified_base 15: mod_base = OTHER; note = 2'-O-methylguanosine-3'-phosphate
  modified_base 16: mod_base = OTHER; note = 2'-O-methyladenosine-3'-phosphate
  modified_base 17: mod_base = OTHER; note = 2'-O-methyluridine-3'-phosphate
  modified_base 18: mod_base = OTHER; note = 2'-O-methylcytidine-3'-phosphate
  modified_base 19: mod_base = OTHER; note = 2'-O-methyladenosine-3'-phosphate
  modified_base 20: mod_base = OTHER; note = 2'-O-methylcytidine-3'-phosphate
  modified_base 21: mod_base = OTHER; note = 2'-O-methyladenosine-3'-phosphate N-[tris(GalNAc-alkyl)-amidodecanoyl)]-4-hydroxyprolinol Hyp-(GalNAc-alkyl)3 (2S,4R)-1-[29-[[2-(acetylamino)-2-deoxy-beta-D-galactopyran osyl]oxy]-14,14-bis[[3-[[3-[[5-[[2-(acetylamino)-2-deoxy-be ta-D-galactopyranosyl]oxy]-1-oxopentyl]amino]propyl]amino]- 3-oxopropoxy]methyl]-1,12,19,25-tetraoxo-16-oxa-13,20,24-tr iazanonacos-1-yl]-4-hydroxy-2-hydroxymethylpyrrolidine
ttcatttagttcatgatcaca

SEQ ID NO: 979 - RNA, 21 nt, synthetic construct
  source 1..21: mol_type = other RNA
  modified_base 1: mod_base = OTHER; note = 2'-O-methyluridine-3'-phosphorothioate
  modified_base 2: mod_base = OTHER; note = 2'-O-methyluridine-3'-phosphorothioate
  modified_base 3: mod_base = OTHER; note = 2'-O-methylcytidine-3'-phosphate
  modified_base 4: mod_base = OTHER; note = 2'-O-methyladenosine-3'-phosphate
  modified_base 5: mod_base = OTHER; note = 2'-O-methyluridine-3'-phosphate
  modified_base 6: mod_base = OTHER; note = 2'-O-hexadecyl-guanosine-3'-phosphate
  modified_base 7: mod_base = OTHER; note = 2'-fluoroadenosine-3'-phosphate
  modified_base 8: mod_base = OTHER; note = 2'-O-methyluridine-3'-phosphate
  modified_base 9: mod_base = OTHER; note = 2'-fluorocytidine-3'-phosphate
  modified_base 10: mod_base = OTHER; note = 2'-fluoroadenosine-3'-phosphate
  modified_base 11: mod_base = OTHER; note = 2'-fluorocytidine-3'-phosphate
  modified_base 12: mod_base = OTHER; note = 2'-O-methylguanosine-3'-phosphate
  modified_base 13: mod_base = OTHER; note = 2'-O-methylguanosine-3'-phosphate
  modified_base 14: mod_base = OTHER; note = 2'-O-methyluridine-3'-phosphate
  modified_base 15: mod_base = OTHER; note = 2'-O-methylguanosine-3'-phosphate
  modified_base 16: mod_base = OTHER; note = 2'-O-methylguanosine-3'-phosphate
  modified_base 17: mod_base = OTHER; note = 2'-O-methyluridine-3'-phosphate
  modified_base 18: mod_base = OTHER; note = 2'-O-methyladenosine-3'-phosphate
  modified_base 19: mod_base = OTHER; note = 2'-O-methylguanosine-3'-phosphate
  modified_base 20: mod_base = OTHER; note = 2'-O-methyluridine-3'-phosphate
  modified_base 21: mod_base = OTHER; note = 2'-O-methyladenosine-3'-phosphate N-[tris(GalNAc-alkyl)-amidodecanoyl)]-4-hydroxyprolinol Hyp-(GalNAc-alkyl)3 (2S,4R)-1-[29-[[2-(acetylamino)-2-deoxy-beta-D-galactopyran osyl]oxy]-14,14-bis[[3-[[3-[[5-[[2-(acetylamino)-2-deoxy-be ta-D-galactopyranosyl]oxy]-1-oxopentyl]amino]propyl]amino]- 3-oxopropoxy]methyl]-1,12,19,25-tetraoxo-16-oxa-13,20,24-tr iazanonacos-1-yl]-4-hydroxy-2-hydroxymethylpyrrolidine
ttcatgatcacggtggtagta

SEQ ID NO: 980 - RNA, 21 nt, synthetic construct
  source 1..21: mol_type = other RNA
  modified_base 1: mod_base = OTHER; note = 2'-O-methyluridine-3'-phosphorothioate
  modified_base 2: mod_base = OTHER; note = 2'-O-methylcytidine-3'- phosphorothioate
  modified_base 3: mod_base = OTHER; note = 2'-O-methyladenosine-3'-phosphate
  modified_base 4: mod_base = OTHER; note = 2'-O-methyluridine-3'-phosphate
  modified_base 5: mod_base = OTHER; note = 2'-O-methylguanosine-3'-phosphate
  modified_base 6: mod_base = OTHER; note = 2'-O-hexadecyl-adenosine-3'-phosphate
  modified_base 7: mod_base = OTHER; note = 2'-fluorouridine-3'-phosphate
  modified_base 8: mod_base = OTHER; note = 2'-O-methylcytidine-3'-phosphate
  modified_base 9: mod_base = OTHER; note = 2'-fluoroadenosine-3'-phosphate
  modified_base 10: mod_base = OTHER; note = 2'-fluorocytidine-3'-phosphate
  modified_base 11: mod_base = OTHER; note = 2'-fluoroguanosine-3'-phosphate
  modified_base 12: mod_base = OTHER; note = 2'-O-methylguanosine-3'-phosphate
  modified_base 13: mod_base = OTHER; note = 2'-O-methyluridine-3'-phosphate
  modified_base 14: mod_base = OTHER; note = 2'-O-methylguanosine-3'-phosphate
  modified_base 15: mod_base = OTHER; note = 2'-O-methylguanosine-3'-phosphate
  modified_base 16: mod_base = OTHER; note = 2'-O-methyluridine-3'-phosphate
  modified_base 17: mod_base = OTHER; note = 2'-O-methyladenosine-3'-phosphate
  modified_base 18: mod_base = OTHER; note = 2'-O-methylguanosine-3'-phosphate
  modified_base 19: mod_base = OTHER; note = 2'-O-methyluridine-3'-phosphate
  modified_base 20: mod_base = OTHER; note = 2'-O-methyladenosine-3'-phosphate
  modified_base 21: mod_base = OTHER; note = 2'-O-methyladenosine-3'-phosphate N-[tris(GalNAc-alkyl)-amidodecanoyl)]-4-hydroxyprolinol Hyp-(GalNAc-alkyl)3 (2S,4R)-1-[29-[[2-(acetylamino)-2-deoxy-beta-D-galactopyran osyl]oxy]-14,14-bis[[3-[[3-[[5-[[2-(acetylamino)-2-deoxy-be ta-D-galactopyranosyl]oxy]-1-oxopentyl]amino]propyl]amino]- 3-oxopropoxy]methyl]-1,12,19,25-tetraoxo-16-oxa-13,20,24-tr iazanonacos-1-yl]-4-hydroxy-2-hydroxymethylpyrrolidine
tcatgatcacggtggtagtaa

SEQ ID NO: 981 - RNA, 21 nt, synthetic construct
  source 1..21: mol_type = other RNA
  modified_base 1: mod_base = OTHER; note = 2'-O-methyluridine-3'-phosphorothioate
  modified_base 2: mod_base = OTHER; note = 2'-O-methylguanosine-3'- phosphorothioate
  modified_base 3: mod_base = OTHER; note = 2'-O-methyladenosine-3'-phosphate
  modified_base 4: mod_base = OTHER; note = 2'-O-methyluridine-3'-phosphate
  modified_base 5: mod_base = OTHER; note = 2'-O-methylcytidine-3'-phosphate
  modified_base 6: mod_base = OTHER; note = 2'-O-hexadecyl-adenosine-3'-phosphate
  modified_base 7: mod_base = OTHER; note = 2'-fluorocytidine-3'-phosphate
  modified_base 8: mod_base = OTHER; note = 2'-O-methylguanosine-3'-phosphate
  modified_base 9: mod_base = OTHER; note = 2'-fluoroguanosine-3'-phosphate
  modified_base 10: mod_base = OTHER; note = 2'-fluorouridine-3'-phosphate
  modified_base 11: mod_base = OTHER; note = 2'-fluoroguanosine-3'-phosphate
  modified_base 12: mod_base = OTHER; note = 2'-O-methylguanosine-3'-phosphate
  modified_base 13: mod_base = OTHER; note = 2'-O-methyluridine-3'-phosphate
  modified_base 14: mod_base = OTHER; note = 2'-O-methyladenosine-3'-phosphate
  modified_base 15: mod_base = OTHER; note = 2'-O-methylguanosine-3'-phosphate
  modified_base 16: mod_base = OTHER; note = 2'-O-methyluridine-3'-phosphate
  modified_base 17: mod_base = OTHER; note = 2'-O-methyladenosine-3'-phosphate
  modified_base 18: mod_base = OTHER; note = 2'-O-methyladenosine-3'-phosphate
  modified_base 19: mod_base = OTHER; note = 2'-O-methylcytidine-3'-phosphate
  modified_base 20: mod_base = OTHER; note = 2'-O-methyladenosine-3'-phosphate
  modified_base 21: mod_base = OTHER; note = 2'-O-methyladenosine-3'-phosphate N-[tris(GalNAc-alkyl)-amidodecanoyl)]-4-hydroxyprolinol Hyp-(GalNAc-alkyl)3 (2S,4R)-1-[29-[[2-(acetylamino)-2-deoxy-beta-D-galactopyran osyl]oxy]-14,14-bis[[3-[[3-[[5-[[2-(acetylamino)-2-deoxy-be ta-D-galactopyranosyl]oxy]-1-oxopentyl]amino]propyl]amino]- 3-oxopropoxy]methyl]-1,12,19,25-tetraoxo-16-oxa-13,20,24-tr iazanonacos-1-yl]-4-hydroxy-2-hydroxymethylpyrrolidine
tgatcacggtggtagtaacaa

SEQ ID NO: 982 - RNA, 21 nt, synthetic construct
  source 1..21: mol_type = other RNA
  modified_base 1: mod_base = OTHER; note = 2'-O-methyluridine-3'-phosphorothioate
  modified_base 2: mod_base = OTHER; note = 2'-O-methyladenosine-3'- phosphorothioate
  modified_base 3: mod_base = OTHER; note = 2'-O-methyladenosine-3'-phosphate
  modified_base 4: mod_base = OTHER; note = 2'-O-methylguanosine-3'-phosphate
  modified_base 5: mod_base = OTHER; note = 2'-O-methylcytidine-3'-phosphate
  modified_base 6: mod_base = OTHER; note = 2'-O-hexadecyl-adenosine-3'-phosphate
  modified_base 7: mod_base = OTHER; note = 2'-fluorocytidine-3'-phosphate
  modified_base 8: mod_base = OTHER; note = 2'-O-methylcytidine-3'-phosphate
  modified_base 9: mod_base = OTHER; note = 2'-fluoroadenosine-3'-phosphate
  modified_base 10: mod_base = OTHER; note = 2'-fluorocytidine-3'-phosphate
  modified_base 11: mod_base = OTHER; note = 2'-fluorocytidine-3'-phosphate
  modified_base 12: mod_base = OTHER; note = 2'-O-methyluridine-3'-phosphate
  modified_base 13: mod_base = OTHER; note = 2'-O-methyladenosine-3'-phosphate
  modified_base 14: mod_base = OTHER; note = 2'-O-methyladenosine-3'-phosphate
  modified_base 15: mod_base = OTHER; note = 2'-O-methylguanosine-3'-phosphate
  modified_base 16: mod_base = OTHER; note = 2'-O-methyladenosine-3'-phosphate
  modified_base 17: mod_base = OTHER; note = 2'-O-methylguanosine-3'-phosphate
  modified_base 18: mod_base = OTHER; note = 2'-O-methyladenosine-3'-phosphate
  modified_base 19: mod_base = OTHER; note = 2'-O-methyluridine-3'-phosphate
  modified_base 20: mod_base = OTHER; note = 2'-O-methylcytidine-3'-phosphate
  modified_base 21: mod_base = OTHER; note = 2'-O-methyladenosine-3'-phosphate N-[tris(GalNAc-alkyl)-amidodecanoyl)]-4-hydroxyprolinol Hyp-(GalNAc-alkyl)3 (2S,4R)-1-[29-[[2-(acetylamino)-2-deoxy-beta-D-galactopyran osyl]oxy]-14,14-bis[[3-[[3-[[5-[[2-(acetylamino)-2-deoxy-be ta-D-galactopyranosyl]oxy]-1-oxopentyl]amino]propyl]amino]- 3-oxopropoxy]methyl]-1,12,19,25-tetraoxo-16-oxa-13,20,24-tr iazanonacos-1-yl]-4-hydroxy-2-hydroxymethylpyrrolidine
taagcaccacctaagagatca

SEQ ID NO: 983 - RNA, 21 nt, synthetic construct
  source 1..21: mol_type = other RNA
  modified_base 1: mod_base = OTHER; note = 2'-O-methyladenosine-3'- phosphorothioate
  modified_base 2: mod_base = OTHER; note = 2'-O-methylcytidine-3'- phosphorothioate
  modified_base 3: mod_base = OTHER; note = 2'-O-methylcytidine-3'-phosphate
  modified_base 4: mod_base = OTHER; note = 2'-O-methyladenosine-3'-phosphate
  modified_base 5: mod_base = OTHER; note = 2'-O-methylcytidine-3'-phosphate
  modified_base 6: mod_base = OTHER; note = 2'-O-hexadecyl-cytidine-3'-phosphate
  modified_base 7: mod_base = OTHER; note = 2'-fluorouridine-3'-phosphate
  modified_base 8: mod_base = OTHER; note = 2'-O-methyladenosine-3'-phosphate
  modified_base 9: mod_base = OTHER; note = 2'-fluoroadenosine-3'-phosphate
  modified_base 10: mod_base = OTHER; note = 2'-fluoroguanosine-3'-phosphate
  modified_base 11: mod_base = OTHER; note = 2'-fluoroadenosine-3'-phosphate
  modified_base 12: mod_base = OTHER; note = 2'-O-methylguanosine-3'-phosphate
  modified_base 13: mod_base = OTHER; note = 2'-O-methyladenosine-3'-phosphate
  modified_base 14: mod_base = OTHER; note = 2'-O-methyluridine-3'-phosphate
  modified_base 15: mod_base = OTHER; note = 2'-O-methylcytidine-3'-phosphate
  modified_base 16: mod_base = OTHER; note = 2'-O-methyluridine-3'-phosphate
  modified_base 17: mod_base = OTHER; note = 2'-O-methylguanosine-3'-phosphate
  modified_base 18: mod_base = OTHER; note = 2'-O-methylcytidine-3'-phosphate
  modified_base 19: mod_base = OTHER; note = 2'-O-methyluridine-3'-phosphate
  modified_base 20: mod_base = OTHER; note = 2'-O-methylcytidine-3'-phosphate
  modified_base 21: mod_base = OTHER; note = 2'-O-methyladenosine-3'-phosphate N-[tris(GalNAc-alkyl)-amidodecanoyl)]-4-hydroxyprolinol Hyp-(GalNAc-alkyl)3 (2S,4R)-1-[29-[[2-(acetylamino)-2-deoxy-beta-D-galactopyran osyl]oxy]-14,14-bis[[3-[[3-[[5-[[2-(acetylamino)-2-deoxy-be ta-D-galactopyranosyl]oxy]-1-oxopentyl]amino]propyl]amino]- 3-oxopropoxy]methyl]-1,12,19,25-tetraoxo-16-oxa-13,20,24-tr iazanonacos-1-yl]-4-hydroxy-2-hydroxymethylpyrrolidine
accacctaagagatctgctca

SEQ ID NO: 984 - RNA, 21 nt, synthetic construct
  source 1..21: mol_type = other RNA
  modified_base 1: mod_base = OTHER; note = 2'-O-methylcytidine-3'- phosphorothioate
  modified_base 2: mod_base = OTHER; note = 2'-O-methyladenosine-3'- phosphorothioate
  modified_base 3: mod_base = OTHER; note = 2'-O-methylcytidine-3'-phosphate
  modified_base 4: mod_base = OTHER; note = 2'-O-methylcytidine-3'-phosphate
  modified_base 5: mod_base = OTHER; note = 2'-O-methyluridine-3'-phosphate
  modified_base 6: mod_base = OTHER; note = 2'-O-hexadecyl-adenosine-3'-phosphate
  modified_base 7: mod_base = OTHER; note = 2'-fluoroadenosine-3'-phosphate
  modified_base 8: mod_base = OTHER; note = 2'-O-methylguanosine-3'-phosphate
  modified_base 9: mod_base = OTHER; note = 2'-fluoroadenosine-3'-phosphate
  modified_base 10: mod_base = OTHER; note = 2'-fluoroguanosine-3'-phosphate
  modified_base 11: mod_base = OTHER; note = 2'-fluoroadenosine-3'-phosphate
  modified_base 12: mod_base = OTHER; note = 2'-O-methyluridine-3'-phosphate
  modified_base 13: mod_base = OTHER; note = 2'-O-methylcytidine-3'-phosphate
  modified_base 14: mod_base = OTHER; note = 2'-O-methyluridine-3'-phosphate
  modified_base 15: mod_base = OTHER; note = 2'-O-methylguanosine-3'-phosphate
  modified_base 16: mod_base = OTHER; note = 2'-O-methylcytidine-3'-phosphate
  modified_base 17: mod_base = OTHER; note = 2'-O-methyluridine-3'-phosphate
  modified_base 18: mod_base = OTHER; note = 2'-O-methylcytidine-3'-phosphate
  modified_base 19: mod_base = OTHER; note = 2'-O-methyladenosine-3'-phosphate
  modified_base 20: mod_base = OTHER; note = 2'-O-methyluridine-3'-phosphate
  modified_base 21: mod_base = OTHER; note = 2'-O-methyladenosine-3'-phosphate N-[tris(GalNAc-alkyl)-amidodecanoyl)]-4-hydroxyprolinol Hyp-(GalNAc-alkyl)3 (2S,4R)-1-[29-[[2-(acetylamino)-2-deoxy-beta-D-galactopyran osyl]oxy]-14,14-bis[[3-[[3-[[5-[[2-(acetylamino)-2-deoxy-be ta-D-galactopyranosyl]oxy]-1-oxopentyl]amino]propyl]amino]- 3-oxopropoxy]methyl]-1,12,19,25-tetraoxo-16-oxa-13,20,24-tr iazanonacos-1-yl]-4-hydroxy-2-hydroxymethylpyrrolidine
cacctaagagatctgctcata

SEQ ID NO: 985 - RNA, 21 nt, synthetic construct
  source 1..21: mol_type = other RNA
  modified_base 1: mod_base = OTHER; note = 2'-O-methyladenosine-3'- phosphorothioate
  modified_base 2: mod_base = OTHER; note = 2'-O-methylcytidine-3'- phosphorothioate
  modified_base 3: mod_base = OTHER; note = 2'-O-methylcytidine-3'-phosphate
  modified_base 4: mod_base = OTHER; note = 2'-O-methyluridine-3'-phosphate
  modified_base 5: mod_base = OTHER; note = 2'-O-methyladenosine-3'-phosphate
  modified_base 6: mod_base = OTHER; note = 2'-O-hexadecyl-adenosine-3'-phosphate
  modified_base 7: mod_base = OTHER; note = 2'-fluoroguanosine-3'-phosphate
  modified_base 8: mod_base = OTHER; note = 2'-O-methyladenosine-3'-phosphate
  modified_base 9: mod_base = OTHER; note = 2'-fluoroguanosine-3'-phosphate
  modified_base 10: mod_base = OTHER; note = 2'-fluoroadenosine-3'-phosphate
  modified_base 11: mod_base = OTHER; note = 2'-fluorouridine-3'-phosphate
  modified_base 12: mod_base = OTHER; note = 2'-O-methylcytidine-3'-phosphate
  modified_base 13: mod_base = OTHER; note = 2'-O-methyluridine-3'-phosphate
  modified_base 14: mod_base = OTHER; note = 2'-O-methylguanosine-3'-phosphate
  modified_base 15: mod_base = OTHER; note = 2'-O-methylcytidine-3'-phosphate
  modified_base 16: mod_base = OTHER; note = 2'-O-methyluridine-3'-phosphate
  modified_base 17: mod_base = OTHER; note = 2'-O-methylcytidine-3'-phosphate
  modified_base 18: mod_base = OTHER; note = 2'-O-methyladenosine-3'-phosphate
  modified_base 19: mod_base = OTHER; note = 2'-O-methyluridine-3'-phosphate
  modified_base 20: mod_base = OTHER; note = 2'-O-methylcytidine-3'-phosphate
  modified_base 21: mod_base = OTHER; note = 2'-O-methyladenosine-3'-phosphate N-[tris(GalNAc-alkyl)-amidodecanoyl)]-4-hydroxyprolinol Hyp-(GalNAc-alkyl)3 (2S,4R)-1-[29-[[2-(acetylamino)-2-deoxy-beta-D-galactopyran osyl]oxy]-14,14-bis[[3-[[3-[[5-[[2-(acetylamino)-2-deoxy-be ta-D-galactopyranosyl]oxy]-1-oxopentyl]amino]propyl]amino]- 3-oxopropoxy]methyl]-1,12,19,25-tetraoxo-16-oxa-13,20,24-tr iazanonacos-1-yl]-4-hydroxy-2-hydroxymethylpyrrolidine
acctaagagatctgctcatca

SEQ ID NO: 986 - RNA, 21 nt, synthetic construct
  source 1..21: mol_type = other RNA
  modified_base 1: mod_base = OTHER; note = 2'-O-methylcytidine-3'- phosphorothioate
  modified_base 2: mod_base = OTHER; note = 2'-O-methyluridine-3'-phosphorothioate
  modified_base 3: mod_base = OTHER; note = 2'-O-methyladenosine-3'-phosphate
  modified_base 4: mod_base = OTHER; note = 2'-O-methyladenosine-3'-phosphate
  modified_base 5: mod_base = OTHER; note = 2'-O-methylguanosine-3'-phosphate
  modified_base 6: mod_base = OTHER; note = 2'-O-hexadecyl-adenosine-3'-phosphate
  modified_base 7: mod_base = OTHER; note = 2'-fluoroguanosine-3'-phosphate
  modified_base 8: mod_base = OTHER; note = 2'-O-methyladenosine-3'-phosphate
  modified_base 9: mod_base = OTHER; note = 2'-fluorouridine-3'-phosphate
  modified_base 10: mod_base = OTHER; note = 2'-fluorocytidine-3'-phosphate
  modified_base 11: mod_base = OTHER; note = 2'-fluorouridine-3'-phosphate
  modified_base 12: mod_base = OTHER; note = 2'-O-methylguanosine-3'-phosphate
  modified_base 13: mod_base = OTHER; note = 2'-O-methylcytidine-3'-phosphate
  modified_base 14: mod_base = OTHER; note = 2'-O-methyluridine-3'-phosphate
  modified_base 15: mod_base = OTHER; note = 2'-O-methylcytidine-3'-phosphate
  modified_base 16: mod_base = OTHER; note = 2'-O-methyladenosine-3'-phosphate
  modified_base 17: mod_base = OTHER; note = 2'-O-methyluridine-3'-phosphate
  modified_base 18: mod_base = OTHER; note = 2'-O-methylcytidine-3'-phosphate
  modified_base 19: mod_base = OTHER; note = 2'-O-methyluridine-3'-phosphate
  modified_base 20: mod_base = OTHER; note = 2'-O-methyladenosine-3'-phosphate
  modified_base 21: mod_base = OTHER; note = 2'-O-methyladenosine-3'-phosphate N-[tris(GalNAc-alkyl)-amidodecanoyl)]-4-hydroxyprolinol Hyp-(GalNAc-alkyl)3 (2S,4R)-1-[29-[[2-(acetylamino)-2-deoxy-beta-D-galactopyran osyl]oxy]-14,14-bis[[3-[[3-[[5-[[2-(acetylamino)-2-deoxy-be ta-D-galactopyranosyl]oxy]-1-oxopentyl]amino]propyl]amino]- 3-oxopropoxy]methyl]-1,12,19,25-tetraoxo-16-oxa-13,20,24-tr iazanonacos-1-yl]-4-hydroxy-2-hydroxymethylpyrrolidine
ctaagagatctgctcatctaa

SEQ ID NO: 987 - RNA, 21 nt, synthetic construct
  source 1..21: mol_type = other RNA
  modified_base 1: mod_base = OTHER; note = 2'-O-methyladenosine-3'- phosphorothioate
  modified_base 2: mod_base = OTHER; note = 2'-O-methyluridine-3'-phosphorothioate
  modified_base 3: mod_base = OTHER; note = 2'-O-methylcytidine-3'-phosphate
  modified_base 4: mod_base = OTHER; note = 2'-O-methyluridine-3'-phosphate
  modified_base 5: mod_base = OTHER; note = 2'-O-methylguanosine-3'-phosphate
  modified_base 6: mod_base = OTHER; note = 2'-O-hexadecyl-cytidine-3'-phosphate
  modified_base 7: mod_base = OTHER; note = 2'-fluorouridine-3'-phosphate
  modified_base 8: mod_base = OTHER; note = 2'-O-methylcytidine-3'-phosphate
  modified_base 9: mod_base = OTHER; note = 2'-fluoroadenosine-3'-phosphate
  modified_base 10: mod_base = OTHER; note = 2'-fluorouridine-3'-phosphate
  modified_base 11: mod_base = OTHER; note = 2'-fluorocytidine-3'-phosphate
  modified_base 12: mod_base = OTHER; note = 2'-O-methyluridine-3'-phosphate
  modified_base 13: mod_base = OTHER; note = 2'-O-methyladenosine-3'-phosphate
  modified_base 14: mod_base = OTHER; note = 2'-O-methyladenosine-3'-phosphate
  modified_base 15: mod_base = OTHER; note = 2'-O-methylguanosine-3'-phosphate
  modified_base 16: mod_base = OTHER; note = 2'-O-methylcytidine-3'-phosphate
  modified_base 17: mod_base = OTHER; note = 2'-O-methylcytidine-3'-phosphate
  modified_base 18: mod_base = OTHER; note = 2'-O-methyluridine-3'-phosphate
  modified_base 19: mod_base = OTHER; note = 2'-O-methyladenosine-3'-phosphate
  modified_base 20: mod_base = OTHER; note = 2'-O-methyladenosine-3'-phosphate
  modified_base 21: mod_base = OTHER; note = 2'-O-methyladenosine-3'-phosphate N-[tris(GalNAc-alkyl)-amidodecanoyl)]-4-hydroxyprolinol Hyp-(GalNAc-alkyl)3 (2S,4R)-1-[29-[[2-(acetylamino)-2-deoxy-beta-D-galactopyran osyl]oxy]-14,14-bis[[3-[[3-[[5-[[2-(acetylamino)-2-deoxy-be ta-D-galactopyranosyl]oxy]-1-oxopentyl]amino]propyl]amino]- 3-oxopropoxy]methyl]-1,12,19,25-tetraoxo-16-oxa-13,20,24-tr iazanonacos-1-yl]-4-hydroxy-2-hydroxymethylpyrrolidine
atctgctcatctaagcctaaa

SEQ ID NO: 988 - RNA, 21 nt, synthetic construct
  source 1..21: mol_type = other RNA
  modified_base 1: mod_base = OTHER; note = 2'-O-methyladenosine-3'- phosphorothioate
  modified_base 2: mod_base = OTHER; note = 2'-O-methyladenosine-3'- phosphorothioate
  modified_base 3: mod_base = OTHER; note = 2'-O-methylguanosine-3'-phosphate
  modified_base 4: mod_base = OTHER; note = 2'-O-methylcytidine-3'-phosphate
  modified_base 5: mod_base = OTHER; note = 2'-O-methylcytidine-3'-phosphate
  modified_base 6: mod_base = OTHER; note = 2'-O-hexadecyl-uridine-3'-phosphate
  modified_base 7: mod_base = OTHER; note = 2'-fluoroadenosine-3'-phosphate
  modified_base 8: mod_base = OTHER; note = 2'-O-methyladenosine-3'-phosphate
  modified_base 9: mod_base = OTHER; note = 2'-fluoroguanosine-3'-phosphate
  modified_base 10: mod_base = OTHER; note = 2'-fluorouridine-3'-phosphate
  modified_base 11: mod_base = OTHER; note = 2'-fluorouridine-3'-phosphate
  modified_base 12: mod_base = OTHER; note = 2'-O-methylguanosine-3'-phosphate
  modified_base 13: mod_base = OTHER; note = 2'-O-methylguanosine-3'-phosphate
  modified_base 14: mod_base = OTHER; note = 2'-O-methyluridine-3'-phosphate
  modified_base 15: mod_base = OTHER; note = 2'-O-methylcytidine-3'-phosphate
  modified_base 16: mod_base = OTHER; note = 2'-O-methyluridine-3'-phosphate
  modified_base 17: mod_base = OTHER; note = 2'-O-methylguanosine-3'-phosphate
  modified_base 18: mod_base = OTHER; note = 2'-O-methylcytidine-3'-phosphate
  modified_base 19: mod_base = OTHER; note = 2'-O-methyladenosine-3'-phosphate
  modified_base 20: mod_base = OTHER; note = 2'-O-methylguanosine-3'-phosphate
  modified_base 21: mod_base = OTHER; note = 2'-O-methyladenosine-3'-phosphate N-[tris(GalNAc-alkyl)-amidodecanoyl)]-4-hydroxyprolinol Hyp-(GalNAc-alkyl)3 (2S,4R)-1-[29-[[2-(acetylamino)-2-deoxy-beta-D-galactopyran osyl]oxy]-14,14-bis[[3-[[3-[[5-[[2-(acetylamino)-2-deoxy-be ta-D-galactopyranosyl]oxy]-1-oxopentyl]amino]propyl]amino]- 3-oxopropoxy]methyl]-1,12,19,25-tetraoxo-16-oxa-13,20,24-tr iazanonacos-1-yl]-4-hydroxy-2-hydroxymethylpyrrolidine
aagcctaagttggtctgcaga

SEQ ID NO: 989 - RNA, 21 nt, synthetic construct
  source 1..21: mol_type = other RNA
  modified_base 1: mod_base = OTHER; note = 2'-O-methylguanosine-3'- phosphorothioate
  modified_base 2: mod_base = OTHER; note = 2'-O-methylcytidine-3'- phosphorothioate
  modified_base 3: mod_base = OTHER; note = 2'-O-methylcytidine-3'-phosphate
  modified_base 4: mod_base = OTHER; note = 2'-O-methyluridine-3'-phosphate
  modified_base 5: mod_base = OTHER; note = 2'-O-methyladenosine-3'-phosphate
  modified_base 6: mod_base = OTHER; note = 2'-O-hexadecyl-adenosine-3'-phosphate
  modified_base 7: mod_base = OTHER; note = 2'-fluoroguanosine-3'-phosphate
  modified_base 8: mod_base = OTHER; note = 2'-O-methyluridine-3'-phosphate
  modified_base 9: mod_base = OTHER; note = 2'-fluorouridine-3'-phosphate
  modified_base 10: mod_base = OTHER; note = 2'-fluoroguanosine-3'-phosphate
  modified_base 11: mod_base = OTHER; note = 2'-fluoroguanosine-3'-phosphate
  modified_base 12: mod_base = OTHER; note = 2'-O-methyluridine-3'-phosphate
  modified_base 13: mod_base = OTHER; note = 2'-O-methylcytidine-3'-phosphate
  modified_base 14: mod_base = OTHER; note = 2'-O-methyluridine-3'-phosphate
  modified_base 15: mod_base = OTHER; note = 2'-O-methylguanosine-3'-phosphate
  modified_base 16: mod_base = OTHER; note = 2'-O-methylcytidine-3'-phosphate
  modified_base 17: mod_base = OTHER; note = 2'-O-methyladenosine-3'-phosphate
  modified_base 18: mod_base = OTHER; note = 2'-O-methylguanosine-3'-phosphate
  modified_base 19: mod_base = OTHER; note = 2'-O-methylguanosine-3'-phosphate
  modified_base 20: mod_base = OTHER; note = 2'-O-methylcytidine-3'-phosphate
  modified_base 21: mod_base = OTHER; note = 2'-O-methyladenosine-3'-phosphate N-[tris(GalNAc-alkyl)-amidodecanoyl)]-4-hydroxyprolinol Hyp-(GalNAc-alkyl)3 (2S,4R)-1-[29-[[2-(acetylamino)-2-deoxy-beta-D-galactopyran osyl]oxy]-14,14-bis[[3-[[3-[[5-[[2-(acetylamino)-2-deoxy-be ta-D-galactopyranosyl]oxy]-1-oxopentyl]amino]propyl]amino]- 3-oxopropoxy]methyl]-1,12,19,25-tetraoxo-16-oxa-13,20,24-tr iazanonacos-1-yl]-4-hydroxy-2-hydroxymethylpyrrolidine
gcctaagttggtctgcaggca

SEQ ID NO: 990 - RNA, 21 nt, synthetic construct
  source 1..21: mol_type = other RNA
  modified_base 1: mod_base = OTHER; note = 2'-O-methylguanosine-3'- phosphorothioate
  modified_base 2: mod_base = OTHER; note = 2'-O-methyluridine-3'-phosphorothioate
  modified_base 3: mod_base = OTHER; note = 2'-O-methylcytidine-3'-phosphate
  modified_base 4: mod_base = OTHER; note = 2'-O-methyluridine-3'-phosphate
  modified_base 5: mod_base = OTHER; note = 2'-O-methylguanosine-3'-phosphate
  modified_base 6: mod_base = OTHER; note = 2'-O-hexadecyl-cytidine-3'-phosphate
  modified_base 7: mod_base = OTHER; note = 2'-fluoroadenosine-3'-phosphate
  modified_base 8: mod_base = OTHER; note = 2'-O-methylguanosine-3'-phosphate
  modified_base 9: mod_base = OTHER; note = 2'-fluoroguanosine-3'-phosphate
  modified_base 10: mod_base = OTHER; note = 2'-fluorocytidine-3'-phosphate
  modified_base 11: mod_base = OTHER; note = 2'-fluoroguanosine-3'-phosphate
  modified_base 12: mod_base = OTHER; note = 2'-O-methyluridine-3'-phosphate
  modified_base 13: mod_base = OTHER; note = 2'-O-methyluridine-3'-phosphate
  modified_base 14: mod_base = OTHER; note = 2'-O-methyluridine-3'-phosphate
  modified_base 15: mod_base = OTHER; note = 2'-O-methylguanosine-3'-phosphate
  modified_base 16: mod_base = OTHER; note = 2'-O-methyladenosine-3'-phosphate
  modified_base 17: mod_base = OTHER; note = 2'-O-methyladenosine-3'-phosphate
  modified_base 18: mod_base = OTHER; note = 2'-O-methyluridine-3'-phosphate
  modified_base 19: mod_base = OTHER; note = 2'-O-methylguanosine-3'-phosphate
  modified_base 20: mod_base = OTHER; note = 2'-O-methyladenosine-3'-phosphate
  modified_base 21: mod_base = OTHER; note = 2'-O-methyladenosine-3'-phosphate N-[tris(GalNAc-alkyl)-amidodecanoyl)]-4-hydroxyprolinol Hyp-(GalNAc-alkyl)3 (2S,4R)-1-[29-[[2-(acetylamino)-2-deoxy-beta-D-galactopyran osyl]oxy]-14,14-bis[[3-[[3-[[5-[[2-(acetylamino)-2-deoxy-be ta-D-galactopyranosyl]oxy]-1-oxopentyl]amino]propyl]amino]- 3-oxopropoxy]methyl]-1,12,19,25-tetraoxo-16-oxa-13,20,24-tr iazanonacos-1-yl]-4-hydroxy-2-hydroxymethylpyrrolidine
gtctgcaggcgtttgaatgaa

SEQ ID NO: 991 - RNA, 21 nt, synthetic construct
  source 1..21: mol_type = other RNA
  modified_base 1: mod_base = OTHER; note = 2'-O-methyladenosine-3'- phosphorothioate
  modified_base 2: mod_base = OTHER; note = 2'-O-methyladenosine-3'- phosphorothioate
  modified_base 3: mod_base = OTHER; note = 2'-O-methyluridine-3'-phosphate
  modified_base 4: mod_base = OTHER; note = 2'-O-methylguanosine-3'-phosphate
  modified_base 5: mod_base = OTHER; note = 2'-O-methyladenosine-3'-phosphate
  modified_base 6: mod_base = OTHER; note = 2'-O-hexadecyl-guanosine-3'-phosphate
  modified_base 7: mod_base = OTHER; note = 2'-fluorouridine-3'-phosphate
  modified_base 8: mod_base = OTHER; note = 2'-O-methyluridine-3'-phosphate
  modified_base 9: mod_base = OTHER; note = 2'-fluoroguanosine-3'-phosphate
  modified_base 10: mod_base = OTHER; note = 2'-fluorouridine-3'-phosphate
  modified_base 11: mod_base = OTHER; note = 2'-fluoroguanosine-3'-phosphate
  modified_base 12: mod_base = OTHER; note = 2'-O-methylguanosine-3'-phosphate
  modified_base 13: mod_base = OTHER; note = 2'-O-methyluridine-3'-phosphate
  modified_base 14: mod_base = OTHER; note = 2'-O-methyluridine-3'-phosphate
  modified_base 15: mod_base = OTHER; note = 2'-O-methylguanosine-3'-phosphate
  modified_base 16: mod_base = OTHER; note = 2'-O-methylcytidine-3'-phosphate
  modified_base 17: mod_base = OTHER; note = 2'-O-methylcytidine-3'-phosphate
  modified_base 18: mod_base = OTHER; note = 2'-O-methyladenosine-3'-phosphate
  modified_base 19: mod_base = OTHER; note = 2'-O-methyladenosine-3'-phosphate
  modified_base 20: mod_base = OTHER; note = 2'-O-methylguanosine-3'-phosphate
  modified_base 21: mod_base = OTHER; note = 2'-O-methyladenosine-3'-phosphate N-[tris(GalNAc-alkyl)-amidodecanoyl)]-4-hydroxyprolinol Hyp-(GalNAc-alkyl)3 (2S,4R)-1-[29-[[2-(acetylamino)-2-deoxy-beta-D-galactopyran osyl]oxy]-14,14-bis[[3-[[3-[[5-[[2-(acetylamino)-2-deoxy-be ta-D-galactopyranosyl]oxy]-1-oxopentyl]amino]propyl]amino]- 3-oxopropoxy]methyl]-1,12,19,25-tetraoxo-16-oxa-13,20,24-tr iazanonacos-1-yl]-4-hydroxy-2-hydroxymethylpyrrolidine
aatgagttgtggttgccaaga

SEQ ID NO: 992 - RNA, 21 nt, synthetic construct
  source 1..21: mol_type = other RNA
  modified_base 1: mod_base = OTHER; note = 2'-O-methyladenosine-3'- phosphorothioate
  modified_base 2: mod_base = OTHER; note = 2'-O-methyluridine-3'-phosphorothioate
  modified_base 3: mod_base = OTHER; note = 2'-O-methylguanosine-3'-phosphate
  modified_base 4: mod_base = OTHER; note = 2'-O-methyladenosine-3'-phosphate
  modified_base 5: mod_base = OTHER; note = 2'-O-methylguanosine-3'-phosphate
  modified_base 6: mod_base = OTHER; note = 2'-O-hexadecyl-uridine-3'-phosphate
  modified_base 7: mod_base = OTHER; note = 2'-fluorouridine-3'-phosphate
  modified_base 8: mod_base = OTHER; note = 2'-O-methylguanosine-3'-phosphate
  modified_base 9: mod_base = OTHER; note = 2'-fluorouridine-3'-phosphate
  modified_base 10: mod_base = OTHER; note = 2'-fluoroguanosine-3'-phosphate
  modified_base 11: mod_base = OTHER; note = 2'-fluoroguanosine-3'-phosphate
  modified_base 12: mod_base = OTHER; note = 2'-O-methyluridine-3'-phosphate
  modified_base 13: mod_base = OTHER; note = 2'-O-methyluridine-3'-phosphate
  modified_base 14: mod_base = OTHER; note = 2'-O-methylguanosine-3'-phosphate
  modified_base 15: mod_base = OTHER; note = 2'-O-methylcytidine-3'-phosphate
  modified_base 16: mod_base = OTHER; note = 2'-O-methylcytidine-3'-phosphate
  modified_base 17: mod_base = OTHER; note = 2'-O-methyladenosine-3'-phosphate
  modified_base 18: mod_base = OTHER; note = 2'-O-methyladenosine-3'-phosphate
  modified_base 19: mod_base = OTHER; note = 2'-O-methylguanosine-3'-phosphate
  modified_base 20: mod_base = OTHER; note = 2'-O-methyluridine-3'-phosphate
  modified_base 21: mod_base = OTHER; note = 2'-O-methyladenosine-3'-phosphate N-[tris(GalNAc-alkyl)-amidodecanoyl)]-4-hydroxyprolinol Hyp-(GalNAc-alkyl)3 (2S,4R)-1-[29-[[2-(acetylamino)-2-deoxy-beta-D-galactopyran osyl]oxy]-14,14-bis[[3-[[3-[[5-[[2-(acetylamino)-2-deoxy-be ta-D-galactopyranosyl]oxy]-1-oxopentyl]amino]propyl]amino]- 3-oxopropoxy]methyl]-1,12,19,25-tetraoxo-16-oxa-13,20,24-tr iazanonacos-1-yl]-4-hydroxy-2-hydroxymethylpyrrolidine
atgagttgtggttgccaagta

SEQ ID NO: 993 - RNA, 21 nt, synthetic construct
  source 1..21: mol_type = other RNA
  modified_base 1: mod_base = OTHER; note = 2'-O-methyluridine-3'-phosphorothioate
  modified_base 2: mod_base = OTHER; note = 2'-O-methylguanosine-3'- phosphorothioate
  modified_base 3: mod_base = OTHER; note = 2'-O-methyladenosine-3'-phosphate
  modified_base 4: mod_base = OTHER; note = 2'-O-methylguanosine-3'-phosphate
  modified_base 5: mod_base = OTHER; note = 2'-O-methyluridine-3'-phosphate
  modified_base 6: mod_base = OTHER; note = 2'-O-hexadecyl-uridine-3'-phosphate
  modified_base 7: mod_base = OTHER; note = 2'-fluoroguanosine-3'-phosphate
  modified_base 8: mod_base = OTHER; note = 2'-O-methyluridine-3'-phosphate
  modified_base 9: mod_base = OTHER; note = 2'-fluoroguanosine-3'-phosphate
  modified_base 10: mod_base = OTHER; note = 2'-fluoroguanosine-3'-phosphate
  modified_base 11: mod_base = OTHER; note = 2'-fluorouridine-3'-phosphate
  modified_base 12: mod_base = OTHER; note = 2'-O-methyluridine-3'-phosphate
  modified_base 13: mod_base = OTHER; note = 2'-O-methylguanosine-3'-phosphate
  modified_base 14: mod_base = OTHER; note = 2'-O-methylcytidine-3'-phosphate
  modified_base 15: mod_base = OTHER; note = 2'-O-methylcytidine-3'-phosphate
  modified_base 16: mod_base = OTHER; note = 2'-O-methyladenosine-3'-phosphate
  modified_base 17: mod_base = OTHER; note = 2'-O-methyladenosine-3'-phosphate
  modified_base 18: mod_base = OTHER; note = 2'-O-methylguanosine-3'-phosphate
  modified_base 19: mod_base = OTHER; note = 2'-O-methyluridine-3'-phosphate
  modified_base 20: mod_base = OTHER; note = 2'-O-methyladenosine-3'-phosphate
  modified_base 21: mod_base = OTHER; note = 2'-O-methyladenosine-3'-phosphate N-[tris(GalNAc-alkyl)-amidodecanoyl)]-4-hydroxyprolinol Hyp-(GalNAc-alkyl)3 (2S,4R)-1-[29-[[2-(acetylamino)-2-deoxy-beta-D-galactopyran osyl]oxy]-14,14-bis[[3-[[3-[[5-[[2-(acetylamino)-2-deoxy-be ta-D-galactopyranosyl]oxy]-1-oxopentyl]amino]propyl]amino]- 3-oxopropoxy]methyl]-1,12,19,25-tetraoxo-16-oxa-13,20,24-tr iazanonacos-1-yl]-4-hydroxy-2-hydroxymethylpyrrolidine
tgagttgtggttgccaagtaa

SEQ ID NO: 994 - RNA, 21 nt, synthetic construct
  source 1..21: mol_type = other RNA
  modified_base 1: mod_base = OTHER; note = 2'-O-methyluridine-3'-phosphorothioate
  modified_base 2: mod_base = OTHER; note = 2'-O-methyluridine-3'-phosphorothioate
  modified_base 3: mod_base = OTHER; note = 2'-O-methylguanosine-3'-phosphate
  modified_base 4: mod_base = OTHER; note = 2'-O-methylcytidine-3'-phosphate
  modified_base 5: mod_base = OTHER; note = 2'-O-methylcytidine-3'-phosphate
  modified_base 6: mod_base = OTHER; note = 2'-O-hexadecyl-adenosine-3'-phosphate
  modified_base 7: mod_base = OTHER; note = 2'-fluoroadenosine-3'-phosphate
  modified_base 8: mod_base = OTHER; note = 2'-O-methylguanosine-3'-phosphate
  modified_base 9: mod_base = OTHER; note = 2'-fluorouridine-3'-phosphate
  modified_base 10: mod_base = OTHER; note = 2'-fluoroadenosine-3'-phosphate
  modified_base 11: mod_base = OTHER; note = 2'-fluoroadenosine-3'-phosphate
  modified_base 12: mod_base = OTHER; note = 2'-O-methyladenosine-3'-phosphate
  modified_base 13: mod_base = OTHER; note = 2'-O-methylguanosine-3'-phosphate
  modified_base 14: mod_base = OTHER; note = 2'-O-methyluridine-3'-phosphate
  modified_base 15: mod_base = OTHER; note = 2'-O-methylguanosine-3'-phosphate
  modified_base 16: mod_base = OTHER; note = 2'-O-methylguanosine-3'-phosphate
  modified_base 17: mod_base = OTHER; note = 2'-O-methyluridine-3'-phosphate
  modified_base 18: mod_base = OTHER; note = 2'-O-methylguanosine-3'-phosphate
  modified_base 19: mod_base = OTHER; note = 2'-O-methyladenosine-3'-phosphate
  modified_base 20: mod_base = OTHER; note = 2'-O-methyladenosine-3'-phosphate
  modified_base 21: mod_base = OTHER; note = 2'-O-methyladenosine-3'-phosphate N-[tris(GalNAc-alkyl)-amidodecanoyl)]-4-hydroxyprolinol Hyp-(GalNAc-alkyl)3 (2S,4R)-1-[29-[[2-(acetylamino)-2-deoxy-beta-D-galactopyran osyl]oxy]-14,14-bis[[3-[[3-[[5-[[2-(acetylamino)-2-deoxy-be ta-D-galactopyranosyl]oxy]-1-oxopentyl]amino]propyl]amino]- 3-oxopropoxy]methyl]-1,12,19,25-tetraoxo-16-oxa-13,20,24-tr iazanonacos-1-yl]-4-hydroxy-2-hydroxymethylpyrrolidine
ttgccaagtaaagtggtgaaa

SEQ ID NO: 995 - RNA, 21 nt, synthetic construct
  source 1..21: mol_type = other RNA
  modified_base 1: mod_base = OTHER; note = 2'-O-methyluridine-3'-phosphorothioate
  modified_base 2: mod_base = OTHER; note = 2'-O-methylguanosine-3'- phosphorothioate
  modified_base 3: mod_base = OTHER; note = 2'-O-methylcytidine-3'-phosphate
  modified_base 4: mod_base = OTHER; note = 2'-O-methylcytidine-3'-phosphate
  modified_base 5: mod_base = OTHER; note = 2'-O-methyladenosine-3'-phosphate
  modified_base 6: mod_base = OTHER; note = 2'-O-hexadecyl-adenosine-3'-phosphate
  modified_base 7: mod_base = OTHER; note = 2'-fluoroguanosine-3'-phosphate
  modified_base 8: mod_base = OTHER; note = 2'-O-methyluridine-3'-phosphate
  modified_base 9: mod_base = OTHER; note = 2'-fluoroadenosine-3'-phosphate
  modified_base 10: mod_base = OTHER; note = 2'-fluoroadenosine-3'-phosphate
  modified_base 11: mod_base = OTHER; note = 2'-fluoroadenosine-3'-phosphate
  modified_base 12: mod_base = OTHER; note = 2'-O-methylguanosine-3'-phosphate
  modified_base 13: mod_base = OTHER; note = 2'-O-methyluridine-3'-phosphate
  modified_base 14: mod_base = OTHER; note = 2'-O-methylguanosine-3'-phosphate
  modified_base 15: mod_base = OTHER; note = 2'-O-methylguanosine-3'-phosphate
  modified_base 16: mod_base = OTHER; note = 2'-O-methyluridine-3'-phosphate
  modified_base 17: mod_base = OTHER; note = 2'-O-methylguanosine-3'-phosphate
  modified_base 18: mod_base = OTHER; note = 2'-O-methyladenosine-3'-phosphate
  modified_base 19: mod_base = OTHER; note = 2'-O-methyladenosine-3'-phosphate
  modified_base 20: mod_base = OTHER; note = 2'-O-methylcytidine-3'-phosphate
  modified_base 21: mod_base = OTHER; note = 2'-O-methyladenosine-3'-phosphate N-[tris(GalNAc-alkyl)-amidodecanoyl)]-4-hydroxyprolinol Hyp-(GalNAc-alkyl)3 (2S,4R)-1-[29-[[2-(acetylamino)-2-deoxy-beta-D-galactopyran osyl]oxy]-14,14-bis[[3-[[3-[[5-[[2-(acetylamino)-2-deoxy-be ta-D-galactopyranosyl]oxy]-1-oxopentyl]amino]propyl]amino]- 3-oxopropoxy]methyl]-1,12,19,25-tetraoxo-16-oxa-13,20,24-tr iazanonacos-1-yl]-4-hydroxy-2-hydroxymethylpyrrolidine
tgccaagtaaagtggtgaaca

SEQ ID NO: 996 - RNA, 21 nt, synthetic construct
  source 1..21: mol_type = other RNA
  modified_base 1: mod_base = OTHER; note = 2'-O-methylcytidine-3'- phosphorothioate
  modified_base 2: mod_base = OTHER; note = 2'-O-methylcytidine-3'- phosphorothioate
  modified_base 3: mod_base = OTHER; note = 2'-O-methyladenosine-3'-phosphate
  modified_base 4: mod_base = OTHER; note = 2'-O-methyladenosine-3'-phosphate
  modified_base 5: mod_base = OTHER; note = 2'-O-methylguanosine-3'-phosphate
  modified_base 6: mod_base = OTHER; note = 2'-O-hexadecyl-uridine-3'-phosphate
  modified_base 7: mod_base = OTHER; note = 2'-fluoroadenosine-3'-phosphate
  modified_base 8: mod_base = OTHER; note = 2'-O-methyladenosine-3'-phosphate
  modified_base 9: mod_base = OTHER; note = 2'-fluoroadenosine-3'-phosphate
  modified_base 10: mod_base = OTHER; note = 2'-fluoroguanosine-3'-phosphate
  modified_base 11: mod_base = OTHER; note = 2'-fluorouridine-3'-phosphate
  modified_base 12: mod_base = OTHER; note = 2'-O-methylguanosine-3'-phosphate
  modified_base 13: mod_base = OTHER; note = 2'-O-methylguanosine-3'-phosphate
  modified_base 14: mod_base = OTHER; note = 2'-O-methyluridine-3'-phosphate
  modified_base 15: mod_base = OTHER; note = 2'-O-methylguanosine-3'-phosphate
  modified_base 16: mod_base = OTHER; note = 2'-O-methyladenosine-3'-phosphate
  modified_base 17: mod_base = OTHER; note = 2'-O-methyladenosine-3'-phosphate
  modified_base 18: mod_base = OTHER; note = 2'-O-methylcytidine-3'-phosphate
  modified_base 19: mod_base = OTHER; note = 2'-O-methyluridine-3'-phosphate
  modified_base 20: mod_base = OTHER; note = 2'-O-methyluridine-3'-phosphate
  modified_base 21: mod_base = OTHER; note = 2'-O-methyladenosine-3'-phosphate N-[tris(GalNAc-alkyl)-amidodecanoyl)]-4-hydroxyprolinol Hyp-(GalNAc-alkyl)3 (2S,4R)-1-[29-[[2-(acetylamino)-2-deoxy-beta-D-galactopyran osyl]oxy]-14,14-bis[[3-[[3-[[5-[[2-(acetylamino)-2-deoxy-be ta-D-galactopyranosyl]oxy]-1-oxopentyl]amino]propyl]amino]- 3-oxopropoxy]methyl]-1,12,19,25-tetraoxo-16-oxa-13,20,24-tr iazanonacos-1-yl]-4-hydroxy-2-hydroxymethylpyrrolidine
ccaagtaaagtggtgaactta

SEQ ID NO: 997 - RNA, 21 nt, synthetic construct
  source 1..21: mol_type = other RNA
  modified_base 1: mod_base = OTHER; note = 2'-O-methyluridine-3'-phosphorothioate
  modified_base 2: mod_base = OTHER; note = 2'-O-methylguanosine-3'- phosphorothioate
  modified_base 3: mod_base = OTHER; note = 2'-O-methylguanosine-3'-phosphate
  modified_base 4: mod_base = OTHER; note = 2'-O-methyluridine-3'-phosphate
  modified_base 5: mod_base = OTHER; note = 2'-O-methylguanosine-3'-phosphate
  modified_base 6: mod_base = OTHER; note = 2'-O-hexadecyl-adenosine-3'-phosphate
  modified_base 7: mod_base = OTHER; note = 2'-fluoroadenosine-3'-phosphate
  modified_base 8: mod_base = OTHER; note = 2'-O-methylcytidine-3'-phosphate
  modified_base 9: mod_base = OTHER; note = 2'-fluorouridine-3'-phosphate
  modified_base 10: mod_base = OTHER; note = 2'-fluorouridine-3'-phosphate
  modified_base 11: mod_base = OTHER; note = 2'-fluoroadenosine-3'-phosphate
  modified_base 12: mod_base = OTHER; note = 2'-O-methylcytidine-3'-phosphate
  modified_base 13: mod_base = OTHER; note = 2'-O-methylguanosine-3'-phosphate
  modified_base 14: mod_base = OTHER; note = 2'-O-methyluridine-3'-phosphate
  modified_base 15: mod_base = OTHER; note = 2'-O-methylguanosine-3'-phosphate
  modified_base 16: mod_base = OTHER; note = 2'-O-methylguanosine-3'-phosphate
  modified_base 17: mod_base = OTHER; note = 2'-O-methyluridine-3'-phosphate
  modified_base 18: mod_base = OTHER; note = 2'-O-methylguanosine-3'-phosphate
  modified_base 19: mod_base = OTHER; note = 2'-O-methyladenosine-3'-phosphate
  modified_base 20: mod_base = OTHER; note = 2'-O-methyluridine-3'-phosphate
  modified_base 21: mod_base = OTHER; note = 2'-O-methyladenosine-3'-phosphate N-[tris(GalNAc-alkyl)-amidodecanoyl)]-4-hydroxyprolinol Hyp-(GalNAc-alkyl)3 (2S,4R)-1-[29-[[2-(acetylamino)-2-deoxy-beta-D-galactopyran osyl]oxy]-14,14-bis[[3-[[3-[[5-[[2-(acetylamino)-2-deoxy-be ta-D-galactopyranosyl]oxy]-1-oxopentyl]amino]propyl]amino]- 3-oxopropoxy]methyl]-1,12,19,25-tetraoxo-16-oxa-13,20,24-tr iazanonacos-1-yl]-4-hydroxy-2-hydroxymethylpyrrolidine
tggtgaacttacgtggtgata

SEQ ID NO: 998 - RNA, 21 nt, synthetic construct
  source 1..21: mol_type = other RNA
  modified_base 1: mod_base = OTHER; note = 2'-O-methyluridine-3'-phosphorothioate
  modified_base 2: mod_base = OTHER; note = 2'-O-methylguanosine-3'- phosphorothioate
  modified_base 3: mod_base = OTHER; note = 2'-O-methyladenosine-3'-phosphate
  modified_base 4: mod_base = OTHER; note = 2'-O-methyladenosine-3'-phosphate
  modified_base 5: mod_base = OTHER; note = 2'-O-methylcytidine-3'-phosphate
  modified_base 6: mod_base = OTHER; note = 2'-O-hexadecyl-uridine-3'-phosphate
  modified_base 7: mod_base = OTHER; note = 2'-fluorouridine-3'-phosphate
  modified_base 8: mod_base = OTHER; note = 2'-O-methyladenosine-3'-phosphate
  modified_base 9: mod_base = OTHER; note = 2'-fluorocytidine-3'-phosphate
  modified_base 10: mod_base = OTHER; note = 2'-fluoroguanosine-3'-phosphate
  modified_base 11: mod_base = OTHER; note = 2'-fluorouridine-3'-phosphate
  modified_base 12: mod_base = OTHER; note = 2'-O-methylguanosine-3'-phosphate
  modified_base 13: mod_base = OTHER; note = 2'-O-methylguanosine-3'-phosphate
  modified_base 14: mod_base = OTHER; note = 2'-O-methyluridine-3'-phosphate
  modified_base 15: mod_base = OTHER; note = 2'-O-methylguanosine-3'-phosphate
  modified_base 16: mod_base = OTHER; note = 2'-O-methyladenosine-3'-phosphate
  modified_base 17: mod_base = OTHER; note = 2'-O-methyluridine-3'-phosphate
  modified_base 18: mod_base = OTHER; note = 2'-O-methyluridine-3'-phosphate
  modified_base 19: mod_base = OTHER; note = 2'-O-methyladenosine-3'-phosphate
  modified_base 20: mod_base = OTHER; note = 2'-O-methyladenosine-3'-phosphate
  modified_base 21: mod_base = OTHER; note = 2'-O-methyladenosine-3'-phosphate N-[tris(GalNAc-alkyl)-amidodecanoyl)]-4-hydroxyprolinol Hyp-(GalNAc-alkyl)3 (2S,4R)-1-[29-[[2-(acetylamino)-2-deoxy-beta-D-galactopyran osyl]oxy]-14,14-bis[[3-[[3-[[5-[[2-(acetylamino)-2-deoxy-be ta-D-galactopyranosyl]oxy]-1-oxopentyl]amino]propyl]amino]- 3-oxopropoxy]methyl]-1,12,19,25-tetraoxo-16-oxa-13,20,24-tr iazanonacos-1-yl]-4-hydroxy-2-hydroxymethylpyrrolidine
tgaacttacgtggtgattaaa

SEQ ID NO: 999 - RNA, 21 nt, synthetic construct
  source 1..21: mol_type = other RNA
  modified_base 1: mod_base = OTHER; note = 2'-O-methyladenosine-3'- phosphorothioate
  modified_base 2: mod_base = OTHER; note = 2'-O-methylcytidine-3'- phosphorothioate
  modified_base 3: mod_base = OTHER; note = 2'-O-methylguanosine-3'-phosphate
  modified_base 4: mod_base = OTHER; note = 2'-O-methyluridine-3'-phosphate
  modified_base 5: mod_base = OTHER; note = 2'-O-methylguanosine-3'-phosphate
  modified_base 6: mod_base = OTHER; note = 2'-O-hexadecyl-guanosine-3'-phosphate
  modified_base 7: mod_base = OTHER; note = 2'-fluorouridine-3'-phosphate
  modified_base 8: mod_base = OTHER; note = 2'-O-methylguanosine-3'-phosphate
  modified_base 9: mod_base = OTHER; note = 2'-fluoroadenosine-3'-phosphate
  modified_base 10: mod_base = OTHER; note = 2'-fluorouridine-3'-phosphate
  modified_base 11: mod_base = OTHER; note = 2'-fluorouridine-3'-phosphate
  modified_base 12: mod_base = OTHER; note = 2'-O-methyladenosine-3'-phosphate
  modified_base 13: mod_base = OTHER; note = 2'-O-methyladenosine-3'-phosphate
  modified_base 14: mod_base = OTHER; note = 2'-O-methyluridine-3'-phosphate
  modified_base 15: mod_base = OTHER; note = 2'-O-methylguanosine-3'-phosphate
  modified_base 16: mod_base = OTHER; note = 2'-O-methyladenosine-3'-phosphate
  modified_base 17: mod_base = OTHER; note = 2'-O-methyladenosine-3'-phosphate
  modified_base 18: mod_base = OTHER; note = 2'-O-methyladenosine-3'-phosphate
  modified_base 19: mod_base = OTHER; note = 2'-O-methyluridine-3'-phosphate
  modified_base 20: mod_base = OTHER; note = 2'-O-methyluridine-3'-phosphate
  modified_base 21: mod_base = OTHER; note = 2'-O-methyladenosine-3'-phosphate N-[tris(GalNAc-alkyl)-amidodecanoyl)]-4-hydroxyprolinol Hyp-(GalNAc-alkyl)3 (2S,4R)-1-[29-[[2-(acetylamino)-2-deoxy-beta-D-galactopyran osyl]oxy]-14,14-bis[[3-[[3-[[5-[[2-(acetylamino)-2-deoxy-be ta-D-galactopyranosyl]oxy]-1-oxopentyl]amino]propyl]amino]- 3-oxopropoxy]methyl]-1,12,19,25-tetraoxo-16-oxa-13,20,24-tr iazanonacos-1-yl]-4-hydroxy-2-hydroxymethylpyrrolidine
acgtggtgattaatgaaatta

SEQ ID NO: 1000 - DNA, 23 bp, synthetic construct
  source 1..23: mol_type = other DNA
  modified_base 1: mod_base = OTHER; note = Vinyl-phosphonate 2'-O-methyluridine-3'-phosphorothioate
  modified_base 2: mod_base = OTHER; note = 2'-fluorocytidine-3'-phosphorothioate
  modified_base 3: mod_base = OTHER; note = 2'-O-methyladenosine-3'-phosphate
  modified_base 4: mod_base = OTHER; note = 2'-O-methylguanosine-3'-phosphate
  modified_base 6: mod_base = OTHER; note = 2'-O-methylcytidine-3'-phosphate
  modified_base 7: mod_base = OTHER; note = Thymidine-glycol nucleic acid (GNA) S-Isomer
  modified_base 8: mod_base = OTHER; note = 2'-O-methylguanosine-3'-phosphate
  modified_base 9: mod_base = OTHER; note = 2'-O-methylcytidine-3'-phosphate
  modified_base 10: mod_base = OTHER; note = 2'-O-methyladenosine-3'-phosphate
  modified_base 11: mod_base = OTHER; note = 2'-O-methylguanosine-3'-phosphate
  modified_base 12: mod_base = OTHER; note = 2'-O-methylguanosine-3'-phosphate
  modified_base 13: mod_base = OTHER; note = 2'-O-methylguanosine-3'-phosphate
  modified_base 14: mod_base = OTHER; note = 2'-fluorouridine-3'-phosphate
  modified_base 15: mod_base = OTHER; note = 2'-O-methyluridine-3'-phosphate
  modified_base 16: mod_base = OTHER; note = 2'-fluoroadenosine-3'-phosphate
  modified_base 17: mod_base = OTHER; note = 2'-O-methylcytidine-3'-phosphate
  modified_base 18: mod_base = OTHER; note = 2'-O-methylcytidine-3'-phosphate
  modified_base 19: mod_base = OTHER; note = 2'-O-methylguanosine-3'-phosphate
  modified_base 20: mod_base = OTHER; note = 2'-O-methylcytidine-3'-phosphate
  modified_base 21: mod_base = OTHER; note = 2'-O-methylcytidine-3'- phosphorothioate
  modified_base 22: mod_base = OTHER; note = 2'-O-methyladenosine-3'- phosphorothioate
  modified_base 23: mod_base = OTHER; note = 2'-O-methyluridine-3'-phosphate
  misc_feature 1..4: note = RNA
  misc_feature 5: note = DNA
  misc_feature 6: note = RNA
  misc_feature 7: note = DNA
  misc_feature 8..23: note = RNA
tcaggctgcagggttaccgccat

SEQ ID NO: 1001 - DNA, 23 bp, synthetic construct
  source 1..23: mol_type = other DNA
  modified_base 1: mod_base = OTHER; note = Vinyl-phosphonate 2'-O-methyluridine-3'-phosphorothioate
  modified_base 2: mod_base = OTHER; note = 2'-fluorocytidine-3'-phosphorothioate
  modified_base 3: mod_base = OTHER; note = 2'-O-methyluridine-3'-phosphate
  modified_base 4: mod_base = OTHER; note = 2'-O-methylguanosine-3'-phosphate
  modified_base 6: mod_base = OTHER; note = 2'-O-methylguanosine-3'-phosphate
  modified_base 7: mod_base = OTHER; note = Thymidine-glycol nucleic acid (GNA) S-Isomer
  modified_base 8: mod_base = OTHER; note = 2'-O-methylcytidine-3'-phosphate
  modified_base 9: mod_base = OTHER; note = 2'-O-methyladenosine-3'-phosphate
  modified_base 10: mod_base = OTHER; note = 2'-O-methylcytidine-3'-phosphate
  modified_base 11: mod_base = OTHER; note = 2'-O-methyluridine-3'-phosphate
  modified_base 12: mod_base = OTHER; note = 2'-O-methylcytidine-3'-phosphate
  modified_base 13: mod_base = OTHER; note = 2'-O-methyluridine-3'-phosphate
  modified_base 14: mod_base = OTHER; note = 2'-fluoroguanosine-3'-phosphate
  modified_base 15: mod_base = OTHER; note = 2'-O-methyluridine-3'-phosphate
  modified_base 16: mod_base = OTHER; note = 2'-fluorocytidine-3'-phosphate
  modified_base 17: mod_base = OTHER; note = 2'-O-methyluridine-3'-phosphate
  modified_base 18: mod_base = OTHER; note = 2'-O-methylcytidine-3'-phosphate
  modified_base 19: mod_base = OTHER; note = 2'-O-methyluridine-3'-phosphate
  modified_base 20: mod_base = OTHER; note = 2'-O-methylguanosine-3'-phosphate
  modified_base 21: mod_base = OTHER; note = 2'-O-methylcytidine-3'- phosphorothioate
  modified_base 22: mod_base = OTHER; note = 2'-O-methylguanosine-3'- phosphorothioate
  modified_base 23: mod_base = OTHER; note = 2'-O-methylguanosine-3'-phosphate
  misc_feature 1..4: note = RNA
  misc_feature 5: note = DNA
  misc_feature 6: note = RNA
  misc_feature 7: note = DNA
  misc_feature 8..23: note = RNA
tctgggtcactctgtctctgcgg

SEQ ID NO: 1002 - DNA, 23 bp, synthetic construct
  source 1..23: mol_type = other DNA
  modified_base 1: mod_base = OTHER; note = Vinyl-phosphonate 2'-O-methyluridine-3'-phosphorothioate
  modified_base 2: mod_base = OTHER; note = 2'-fluoroguanosine-3'-phosphorothioate
  modified_base 3: mod_base = OTHER; note = 2'-O-methyluridine-3'-phosphate
  modified_base 4: mod_base = OTHER; note = 2'-O-methyluridine-3'-phosphate
  modified_base 6: mod_base = OTHER; note = 2'-O-methylcytidine-3'-phosphate
  modified_base 7: mod_base = OTHER; note = Thymidine-glycol nucleic acid (GNA) S-Isomer
  modified_base 8: mod_base = OTHER; note = 2'-O-methylguanosine-3'-phosphate
  modified_base 9: mod_base = OTHER; note = 2'-O-methylguanosine-3'-phosphate
  modified_base 10: mod_base = OTHER; note = 2'-O-methylguanosine-3'-phosphate
  modified_base 11: mod_base = OTHER; note = 2'-O-methyluridine-3'-phosphate
  modified_base 12: mod_base = OTHER; note = 2'-O-methylcytidine-3'-phosphate
  modified_base 13: mod_base = OTHER; note = 2'-O-methyladenosine-3'-phosphate
  modified_base 14: mod_base = OTHER; note = 2'-fluorocytidine-3'-phosphate
  modified_base 15: mod_base = OTHER; note = 2'-O-methyluridine-3'-phosphate
  modified_base 16: mod_base = OTHER; note = 2'-fluorocytidine-3'-phosphate
  modified_base 17: mod_base = OTHER; note = 2'-O-methyluridine-3'-phosphate
  modified_base 18: mod_base = OTHER; note = 2'-O-methylguanosine-3'-phosphate
  modified_base 19: mod_base = OTHER; note = 2'-O-methyluridine-3'-phosphate
  modified_base 20: mod_base = OTHER; note = 2'-O-methylcytidine-3'-phosphate
  modified_base 21: mod_base = OTHER; note = 2'-O-methyluridine-3'-phosphorothioate
  modified_base 22: mod_base = OTHER; note = 2'-O-methylcytidine-3'- phosphorothioate
  modified_base 23: mod_base = OTHER; note = 2'-O-methyluridine-3'-phosphate
  misc_feature 1..4: note = RNA
  misc_feature 5: note = DNA
  misc_feature 6: note = RNA
  misc_feature 7: note = DNA
  misc_feature 8..23: note = RNA
tgttgctgggtcactctgtctct

SEQ ID NO: 1003 - DNA, 23 bp, synthetic construct
  source 1..23: mol_type = other DNA
  modified_base 1: mod_base = OTHER; note = Vinyl-phosphonate 2'-O-methyluridine-3'-phosphorothioate
  modified_base 2: mod_base = OTHER; note = 2'-fluorouridine -3'-phosphorothioate
  modified_base 3: mod_base = OTHER; note = 2'-O-methylguanosine-3'-phosphate
  modified_base 4: mod_base = OTHER; note = 2'-O-methylguanosine-3'-phosphate
  modified_base 6: mod_base = OTHER; note = 2'-O-methyluridine-3'-phosphate
  modified_base 7: mod_base = OTHER; note = Thymidine-glycol nucleic acid (GNA) S-Isomer
  modified_base 8: mod_base = OTHER; note = 2'-O-methylguanosine-3'-phosphate
  modified_base 9: mod_base = OTHER; note = 2'-O-methylcytidine-3'-phosphate
  modified_base 10: mod_base = OTHER; note = 2'-O-methyluridine-3'-phosphate
  modified_base 11: mod_base = OTHER; note = 2'-O-methylguanosine-3'-phosphate
  modified_base 12: mod_base = OTHER; note = 2'-O-methylguanosine-3'-phosphate
  modified_base 13: mod_base = OTHER; note = 2'-O-methylguanosine-3'-phosphate
  modified_base 14: mod_base = OTHER; note = 2'-fluorouridine-3'-phosphate
  modified_base 15: mod_base = OTHER; note = 2'-O-methylcytidine-3'-phosphate
  modified_base 16: mod_base = OTHER; note = 2'-fluoroadenosine-3'-phosphate
  modified_base 17: mod_base = OTHER; note = 2'-O-methylcytidine-3'-phosphate
  modified_base 18: mod_base = OTHER; note = 2'-O-methyluridine-3'-phosphate
  modified_base 19: mod_base = OTHER; note = 2'-O-methylcytidine-3'-phosphate
  modified_base 20: mod_base = OTHER; note = 2'-O-methyluridine-3'-phosphate
  modified_base 21: mod_base = OTHER; note = 2'-O-methylguanosine-3'- phosphorothioate
  modified_base 22: mod_base = OTHER; note = 2'-O-methyluridine-3'-phosphorothioate
  modified_base 23: mod_base = OTHER; note = 2'-O-methylcytidine-3'-phosphate
  misc_feature 1..4: note = RNA
  misc_feature 5: note = DNA
  misc_feature 6: note = RNA
  misc_feature 7: note = DNA
  misc_feature 8..23: note = RNA
ttgggttgctgggtcactctgtc

SEQ ID NO: 1004 - DNA, 23 bp, synthetic construct
  source 1..23: mol_type = other DNA
  modified_base 1: mod_base = OTHER; note = Vinyl-phosphonate 2'-O-methyluridine-3'-phosphorothioate
  modified_base 2: mod_base = OTHER; note = 2'-fluorocytidine-3'-phosphorothioate
  modified_base 3: mod_base = OTHER; note = 2'-O-methyluridine-3'-phosphate
  modified_base 4: mod_base = OTHER; note = 2'-O-methylguanosine-3'-phosphate
  modified_base 6: mod_base = OTHER; note = 2'-O-methylguanosine-3'-phosphate
  modified_base 7: mod_base = OTHER; note = Thymidine-glycol nucleic acid (GNA) S-Isomer
  modified_base 8: mod_base = OTHER; note = 2'-O-methyluridine-3'-phosphate
  modified_base 9: mod_base = OTHER; note = 2'-O-methylguanosine-3'-phosphate
  modified_base 10: mod_base = OTHER; note = 2'-O-methylcytidine-3'-phosphate
  modified_base 11: mod_base = OTHER; note = 2'-O-methyluridine-3'-phosphate
  modified_base 12: mod_base = OTHER; note = 2'-O-methylguanosine-3'-phosphate
  modified_base 13: mod_base = OTHER; note = 2'-O-methylguanosine-3'-phosphate
  modified_base 14: mod_base = OTHER; note = 2'-fluoroguanosine-3'-phosphate
  modified_base 15: mod_base = OTHER; note = 2'-O-methyluridine-3'-phosphate
  modified_base 16: mod_base = OTHER; note = 2'-fluorocytidine-3'-phosphate
  modified_base 17: mod_base = OTHER; note = 2'-O-methyladenosine-3'-phosphate
  modified_base 18: mod_base = OTHER; note = 2'-O-methylcytidine-3'-phosphate
  modified_base 19: mod_base = OTHER; note = 2'-O-methyluridine-3'-phosphate
  modified_base 20: mod_base = OTHER; note = 2'-O-methylcytidine-3'-phosphate
  modified_base 21: mod_base = OTHER; note = 2'-O-methyluridine-3'-phosphorothioate
  modified_base 22: mod_base = OTHER; note = 2'-O-methylguanosine-3'- phosphorothioate
  modified_base 23: mod_base = OTHER; note = 2'-O-methyluridine-3'-phosphate
  misc_feature 1..4: note = RNA
  misc_feature 5: note = DNA
  misc_feature 6: note = RNA
  misc_feature 7: note = DNA
  misc_feature 8..23: note = RNA
tctgggttgctgggtcactctgt

SEQ ID NO: 1005 - RNA, 23 nt, synthetic construct
  source 1..23: mol_type = other RNA
  modified_base 1: mod_base = OTHER; note = Vinyl-phosphonate 2'-O-methyluridine-3'-phosphorothioate
  modified_base 2: mod_base = OTHER; note = 2'-fluorocytidine-3'-phosphorothioate
  modified_base 3: mod_base = OTHER; note = 2'-O-methyluridine-3'-phosphate
  modified_base 4: mod_base = OTHER; note = 2'-O-methylcytidine-3'-phosphate
  modified_base 5: mod_base = OTHER; note = 2'-O-methyladenosine-3'-phosphate
  modified_base 6: mod_base = OTHER; note = 2'-fluorouridine-3'-phosphate
  modified_base 7: mod_base = OTHER; note = 2'-O-methylguanosine-3'-phosphate
  modified_base 8: mod_base = OTHER; note = 2'-fluoroguanosine-3'-phosphate
  modified_base 9: mod_base = OTHER; note = 2'-fluoroguanosine-3'-phosphate
  modified_base 10: mod_base = OTHER; note = 2'-O-methylcytidine-3'-phosphate
  modified_base 11: mod_base = OTHER; note = 2'-O-methyluridine-3'-phosphate
  modified_base 12: mod_base = OTHER; note = 2'-O-methylcytidine-3'-phosphate
  modified_base 13: mod_base = OTHER; note = 2'-O-methyluridine-3'-phosphate
  modified_base 14: mod_base = OTHER; note = 2'-fluoroguanosine-3'-phosphate
  modified_base 15: mod_base = OTHER; note = 2'-O-methylguanosine-3'-phosphate
  modified_base 16: mod_base = OTHER; note = 2'-fluoroguanosine-3'-phosphate
  modified_base 17: mod_base = OTHER; note = 2'-O-methyluridine-3'-phosphate
  modified_base 18: mod_base = OTHER; note = 2'-O-methyluridine-3'-phosphate
  modified_base 19: mod_base = OTHER; note = 2'-O-methylguanosine-3'-phosphate
  modified_base 20: mod_base = OTHER; note = 2'-O-methylcytidine-3'-phosphate
  modified_base 21: mod_base = OTHER; note = 2'-O-methyluridine-3'-phosphorothioate
  modified_base 22: mod_base = OTHER; note = 2'-O-methylguanosine-3'- phosphorothioate
  modified_base 23: mod_base = OTHER; note = 2'-O-methylguanosine-3'-phosphate
tctcatgggctctgggttgctgg

SEQ ID NO: 1006 - DNA, 23 bp, synthetic construct
  source 1..23: mol_type = other DNA
  modified_base 1: mod_base = OTHER; note = Vinyl-phosphonate 2'-O-methyluridine-3'-phosphorothioate
  modified_base 2: mod_base = OTHER; note = 2'-deoxycytidine-3'-phosphorothioate
  modified_base 3: mod_base = OTHER; note = 2'-O-methyluridine-3'-phosphate
  modified_base 4: mod_base = OTHER; note = 2'-O-methylcytidine-3'-phosphate
  modified_base 6: mod_base = OTHER; note = 2'-O-methyluridine-3'-phosphate
  modified_base 8: mod_base = OTHER; note = 2'-O-methylguanosine-3'-phosphate
  modified_base 9: mod_base = OTHER; note = 2'-O-methylguanosine-3'-phosphate
  modified_base 10: mod_base = OTHER; note = 2'-O-methylcytidine-3'-phosphate
  modified_base 11: mod_base = OTHER; note = 2'-O-methyluridine-3'-phosphate
  modified_base 13: mod_base = OTHER; note = 2'-O-methyluridine-3'-phosphate
  modified_base 14: mod_base = OTHER; note = 2'-fluoroguanosine-3'-phosphate
  modified_base 15: mod_base = OTHER; note = 2'-O-methylguanosine-3'-phosphate
  modified_base 16: mod_base = OTHER; note = 2'-O-methylguanosine-3'-phosphate
  modified_base 17: mod_base = OTHER; note = 2'-O-methyluridine-3'-phosphate
  modified_base 18: mod_base = OTHER; note = 2'-O-methyluridine-3'-phosphate
  modified_base 19: mod_base = OTHER; note = 2'-O-methylguanosine-3'-phosphate
  modified_base 20: mod_base = OTHER; note = 2'-O-methylcytidine-3'-phosphate
  modified_base 21: mod_base = OTHER; note = 2'-O-methyluridine-3'-phosphorothioate
  modified_base 22: mod_base = OTHER; note = 2'-O-methylguanosine-3'- phosphorothioate
  modified_base 23: mod_base = OTHER; note = 2'-O-methylguanosine-3'-phosphate
  misc_feature 1: note = RNA
  misc_feature 2: note = DNA
  misc_feature 3..4: note = RNA
  misc_feature 5: note = DNA
  misc_feature 6: note = RNA
  misc_feature 7: note = DNA
  misc_feature 8..11: note = RNA
  misc_feature 12: note = DNA
  misc_feature 13..23: note = RNA
tctcatgggctctgggttgctgg

SEQ ID NO: 1007 - RNA, 23 nt, synthetic construct
  source 1..23: mol_type = other RNA
  modified_base 1: mod_base = OTHER; note = Vinyl-phosphonate 2'-O-methyluridine-3'-phosphorothioate
  modified_base 2: mod_base = OTHER; note = 2'-fluorocytidine-3'-phosphorothioate
  modified_base 3: mod_base = OTHER; note = 2'-O-methylcytidine-3'-phosphate
  modified_base 4: mod_base = OTHER; note = 2'-O-methyluridine-3'-phosphate
  modified_base 5: mod_base = OTHER; note = 2'-O-methylcytidine-3'-phosphate
  modified_base 6: mod_base = OTHER; note = 2'-fluoroadenosine-3'-phosphate
  modified_base 7: mod_base = OTHER; note = 2'-O-methyluridine-3'-phosphate
  modified_base 8: mod_base = OTHER; note = 2'-fluoroguanosine-3'-phosphate
  modified_base 9: mod_base = OTHER; note = 2'-fluoroguanosine-3'-phosphate
  modified_base 10: mod_base = OTHER; note = 2'-O-methylguanosine-3'-phosphate
  modified_base 11: mod_base = OTHER; note = 2'-O-methylcytidine-3'-phosphate
  modified_base 12: mod_base = OTHER; note = 2'-O-methyluridine-3'-phosphate
  modified_base 13: mod_base = OTHER; note = 2'-O-methylcytidine-3'-phosphate
  modified_base 14: mod_base = OTHER; note = 2'-fluorouridine-3'-phosphate
  modified_base 15: mod_base = OTHER; note = 2'-O-methylguanosine-3'-phosphate
  modified_base 16: mod_base = OTHER; note = 2'-fluoroguanosine-3'-phosphate
  modified_base 17: mod_base = OTHER; note = 2'-O-methylguanosine-3'-phosphate
  modified_base 18: mod_base = OTHER; note = 2'-O-methyluridine-3'-phosphate
  modified_base 19: mod_base = OTHER; note = 2'-O-methyluridine-3'-phosphate
  modified_base 20: mod_base = OTHER; note = 2'-O-methylguanosine-3'-phosphate
  modified_base 21: mod_base = OTHER; note = 2'-O-methylcytidine-3'- phosphorothioate
  modified_base 22: mod_base = OTHER; note = 2'-O-methyluridine-3'-phosphorothioate
  modified_base 23: mod_base = OTHER; note = 2'-O-methylguanosine-3'-phosphate
tcctcatgggctctgggttgctg

SEQ ID NO: 1008 - DNA, 23 bp, synthetic construct
  source 1..23: mol_type = other DNA
  modified_base 1: mod_base = OTHER; note = Vinyl-phosphonate 2'-O-methyluridine-3'-phosphorothioate
  modified_base 2: mod_base = OTHER; note = 2'-deoxycytidine-3'-phosphorothioate
  modified_base 3: mod_base = OTHER; note = 2'-O-methylcytidine-3'-phosphate
  modified_base 4: mod_base = OTHER; note = 2'-O-methyluridine-3'-phosphate
  modified_base 6: mod_base = OTHER; note = 2'-O-methyladenosine-3'-phosphate
  modified_base 8: mod_base = OTHER; note = 2'-O-methylguanosine-3'-phosphate
  modified_base 9: mod_base = OTHER; note = 2'-O-methylguanosine-3'-phosphate
  modified_base 10: mod_base = OTHER; note = 2'-O-methylguanosine-3'-phosphate
  modified_base 11: mod_base = OTHER; note = 2'-O-methylcytidine-3'-phosphate
  modified_base 13: mod_base = OTHER; note = 2'-O-methylcytidine-3'-phosphate
  modified_base 14: mod_base = OTHER; note = 2'-fluorouridine-3'-phosphate
  modified_base 15: mod_base = OTHER; note = 2'-O-methylguanosine-3'-phosphate
  modified_base 16: mod_base = OTHER; note = 2'-O-methylguanosine-3'-phosphate
  modified_base 17: mod_base = OTHER; note = 2'-O-methylguanosine-3'-phosphate
  modified_base 18: mod_base = OTHER; note = 2'-O-methyluridine-3'-phosphate
  modified_base 19: mod_base = OTHER; note = 2'-O-methyluridine-3'-phosphate
  modified_base 20: mod_base = OTHER; note = 2'-O-methylguanosine-3'-phosphate
  modified_base 21: mod_base = OTHER; note = 2'-O-methylcytidine-3'- phosphorothioate
  modified_base 22: mod_base = OTHER; note = 2'-O-methyluridine-3'-phosphorothioate
  modified_base 23: mod_base = OTHER; note = 2'-O-methylguanosine-3'-phosphate
  misc_feature 1: note = RNA
  misc_feature 2: note = DNA
  misc_feature 3..4: note = RNA
  misc_feature 5: note = DNA
  misc_feature 6: note = RNA
  misc_feature 7: note = DNA
  misc_feature 8..11: note = RNA
  misc_feature 12: note = DNA
  misc_feature 13..23: note = RNA
tcctcatgggctctgggttgctg

SEQ ID NO: 1009 - DNA, 23 bp, synthetic construct
  source 1..23: mol_type = other DNA
  modified_base 1: mod_base = OTHER; note = Vinyl-phosphonate 2'-O-methyluridine-3'-phosphorothioate
  modified_base 2: mod_base = OTHER; note = 2'-fluorocytidine-3'-phosphorothioate
  modified_base 3: mod_base = OTHER; note = 2'-O-methylcytidine-3'-phosphate
  modified_base 4: mod_base = OTHER; note = 2'-O-methylcytidine-3'-phosphate
  modified_base 6: mod_base = OTHER; note = 2'-O-methylcytidine-3'-phosphate
  modified_base 7: mod_base = OTHER; note = Adenosine-glycol nucleic acid (GNA) S-Isomer
  modified_base 8: mod_base = OTHER; note = 2'-O-methyluridine-3'-phosphate
  modified_base 9: mod_base = OTHER; note = 2'-O-methylguanosine-3'-phosphate
  modified_base 10: mod_base = OTHER; note = 2'-O-methylguanosine-3'-phosphate
  modified_base 11: mod_base = OTHER; note = 2'-O-methylguanosine-3'-phosphate
  modified_base 12: mod_base = OTHER; note = 2'-O-methylcytidine-3'-phosphate
  modified_base 13: mod_base = OTHER; note = 2'-O-methyluridine-3'-phosphate
  modified_base 14: mod_base = OTHER; note = 2'-fluorocytidine-3'-phosphate
  modified_base 15: mod_base = OTHER; note = 2'-O-methyluridine-3'-phosphate
  modified_base 16: mod_base = OTHER; note = 2'-fluoroguanosine-3'-phosphate
  modified_base 17: mod_base = OTHER; note = 2'-O-methylguanosine-3'-phosphate
  modified_base 18: mod_base = OTHER; note = 2'-O-methylguanosine-3'-phosphate
  modified_base 19: mod_base = OTHER; note = 2'-O-methyluridine-3'-phosphate
  modified_base 20: mod_base = OTHER; note = 2'-O-methyluridine-3'-phosphate
  modified_base 21: mod_base = OTHER; note = 2'-O-methylguanosine-3'- phosphorothioate
  modified_base 22: mod_base = OTHER; note = 2'-O-methylcytidine-3'- phosphorothioate
  modified_base 23: mod_base = OTHER; note = 2'-O-methyluridine-3'-phosphate
  misc_feature 1..4: note = RNA
  misc_feature 5: note = DNA
  misc_feature 6..23: note = RNA
tccctcatgggctctgggttgct

SEQ ID NO: 1010 - RNA, 23 nt, synthetic construct
  source 1..23: mol_type = other RNA
  modified_base 1: mod_base = OTHER; note = Vinyl-phosphonate 2'-O-methyluridine-3'-phosphorothioate
  modified_base 2: mod_base = OTHER; note = 2'-fluorocytidine-3'-phosphorothioate
  modified_base 3: mod_base = OTHER; note = 2'-O-methylcytidine-3'-phosphate
  modified_base 4: mod_base = OTHER; note = 2'-O-methylcytidine-3'-phosphate
  modified_base 5: mod_base = OTHER; note = 2'-O-methyluridine-3'-phosphate
  modified_base 6: mod_base = OTHER; note = 2'-fluorocytidine-3'-phosphate
  modified_base 7: mod_base = OTHER; note = 2'-O-methyladenosine-3'-phosphate
  modified_base 8: mod_base = OTHER; note = 2'-fluorouridine-3'-phosphate
  modified_base 9: mod_base = OTHER; note = 2'-fluoroguanosine-3'-phosphate
  modified_base 10: mod_base = OTHER; note = 2'-O-methylguanosine-3'-phosphate
  modified_base 11: mod_base = OTHER; note = 2'-O-methylguanosine-3'-phosphate
  modified_base 12: mod_base = OTHER; note = 2'-O-methylcytidine-3'-phosphate
  modified_base 13: mod_base = OTHER; note = 2'-O-methyluridine-3'-phosphate
  modified_base 14: mod_base = OTHER; note = 2'-fluorocytidine-3'-phosphate
  modified_base 15: mod_base = OTHER; note = 2'-O-methyluridine-3'-phosphate
  modified_base 16: mod_base = OTHER; note = 2'-fluoroguanosine-3'-phosphate
  modified_base 17: mod_base = OTHER; note = 2'-O-methylguanosine-3'-phosphate
  modified_base 18: mod_base = OTHER; note = 2'-O-methylguanosine-3'-phosphate
  modified_base 19: mod_base = OTHER; note = 2'-O-methyluridine-3'-phosphate
  modified_base 20: mod_base = OTHER; note = 2'-O-methyluridine-3'-phosphate
  modified_base 21: mod_base = OTHER; note = 2'-O-methylguanosine-3'- phosphorothioate
  modified_base 22: mod_base = OTHER; note = 2'-O-methylcytidine-3'- phosphorothioate
  modified_base 23: mod_base = OTHER; note = 2'-O-methyluridine-3'-phosphate
tccctcatgggctctgggttgct

SEQ ID NO: 1011 - DNA, 23 bp, synthetic construct
  source 1..23: mol_type = other DNA
  modified_base 1: mod_base = OTHER; note = Vinyl-phosphonate 2'-O-methyluridine-3'-phosphorothioate
  modified_base 2: mod_base = OTHER; note = 2'-deoxycytidine-3'-phosphorothioate
  modified_base 3: mod_base = OTHER; note = 2'-O-methylcytidine-3'-phosphate
  modified_base 4: mod_base = OTHER; note = 2'-O-methylcytidine-3'-phosphate
  modified_base 6: mod_base = OTHER; note = 2'-O-methylcytidine-3'-phosphate
  modified_base 8: mod_base = OTHER; note = 2'-O-methyluridine-3'-phosphate
  modified_base 9: mod_base = OTHER; note = 2'-O-methylguanosine-3'-phosphate
  modified_base 10: mod_base = OTHER; note = 2'-O-methylguanosine-3'-phosphate
  modified_base 11: mod_base = OTHER; note = 2'-O-methylguanosine-3'-phosphate
  modified_base 13: mod_base = OTHER; note = 2'-O-methyluridine-3'-phosphate
  modified_base 14: mod_base = OTHER; note = 2'-fluorocytidine-3'-phosphate
  modified_base 15: mod_base = OTHER; note = 2'-O-methyluridine-3'-phosphate
  modified_base 16: mod_base = OTHER; note = 2'-O-methylguanosine-3'-phosphate
  modified_base 17: mod_base = OTHER; note = 2'-O-methylguanosine-3'-phosphate
  modified_base 18: mod_base = OTHER; note = 2'-O-methylguanosine-3'-phosphate
  modified_base 19: mod_base = OTHER; note = 2'-O-methyluridine-3'-phosphate
  modified_base 20: mod_base = OTHER; note = 2'-O-methyluridine-3'-phosphate
  modified_base 21: mod_base = OTHER; note = 2'-O-methylguanosine-3'- phosphorothioate
  modified_base 22: mod_base = OTHER; note = 2'-O-methylcytidine-3'- phosphorothioate
  modified_base 23: mod_base = OTHER; note = 2'-O-methyluridine-3'-phosphate
  misc_feature 1: note = RNA
  misc_feature 2: note = DNA
  misc_feature 3..4: note = RNA
  misc_feature 5: note = DNA
  misc_feature 6: note = RNA
  misc_feature 7: note = DNA
  misc_feature 8..11: note = RNA
  misc_feature 12: note = DNA
  misc_feature 13..23: note = RNA
tccctcatgggctctgggttgct

SEQ ID NO: 1012 - DNA, 23 bp, synthetic construct
  source 1..23: mol_type = other DNA
  modified_base 1: mod_base = OTHER; note = Vinyl-phosphonate 2'-O-methyluridine-3'-phosphorothioate
  modified_base 2: mod_base = OTHER; note = 2'-fluoroguanosine-3'-phosphorothioate
  modified_base 3: mod_base = OTHER; note = 2'-O-methyluridine-3'-phosphate
  modified_base 4: mod_base = OTHER; note = 2'-O-methylcytidine-3'-phosphate
  modified_base 6: mod_base = OTHER; note = 2'-O-methylcytidine-3'-phosphate
  modified_base 7: mod_base = OTHER; note = Thymidine-glycol nucleic acid (GNA) S-Isomer
  modified_base 8: mod_base = OTHER; note = 2'-O-methylcytidine-3'-phosphate
  modified_base 9: mod_base = OTHER; note = 2'-O-methyladenosine-3'-phosphate
  modified_base 10: mod_base = OTHER; note = 2'-O-methyluridine-3'-phosphate
  modified_base 11: mod_base = OTHER; note = 2'-O-methylguanosine-3'-phosphate
  modified_base 12: mod_base = OTHER; note = 2'-O-methylguanosine-3'-phosphate
  modified_base 13: mod_base = OTHER; note = 2'-O-methylguanosine-3'-phosphate
  modified_base 14: mod_base = OTHER; note = 2'-fluorocytidine-3'-phosphate
  modified_base 15: mod_base = OTHER; note = 2'-O-methyluridine-3'-phosphate
  modified_base 16: mod_base = OTHER; note = 2'-fluorocytidine-3'-phosphate
  modified_base 17: mod_base = OTHER; note = 2'-O-methyluridine-3'-phosphate
  modified_base 18: mod_base = OTHER; note = 2'-O-methylguanosine-3'-phosphate
  modified_base 19: mod_base = OTHER; note = 2'-O-methylguanosine-3'-phosphate
  modified_base 20: mod_base = OTHER; note = 2'-O-methylguanosine-3'-phosphate
  modified_base 21: mod_base = OTHER; note = 2'-O-methyluridine-3'-phosphorothioate
  modified_base 22: mod_base = OTHER; note = 2'-O-methyluridine-3'-phosphorothioate
  modified_base 23: mod_base = OTHER; note = 2'-O-methylguanosine-3'-phosphate
  misc_feature 1..4: note = RNA
  misc_feature 5: note = DNA
  misc_feature 6: note = RNA
  misc_feature 7: note = DNA
  misc_feature 8..23: note = RNA
tgtccctcatgggctctgggttg

SEQ ID NO: 1013 - RNA, 23 nt, synthetic construct
  source 1..23: mol_type = other RNA
  modified_base 1: mod_base = OTHER; note = Vinyl-phosphonate 2'-O-methyluridine-3'-phosphorothioate
  modified_base 2: mod_base = OTHER; note = 2'-fluoroadenosine-3'-phosphorothioate
  modified_base 3: mod_base = OTHER; note = 2'-O-methyladenosine-3'-phosphate
  modified_base 4: mod_base = OTHER; note = 2'-O-methylguanosine-3'-phosphate
  modified_base 5: mod_base = OTHER; note = 2'-O-methyladenosine-3'-phosphate
  modified_base 6: mod_base = OTHER; note = 2'-fluorocytidine-3'-phosphate
  modified_base 7: mod_base = OTHER; note = 2'-O-methylcytidine-3'-phosphate
  modified_base 8: mod_base = OTHER; note = 2'-fluorocytidine-3'-phosphate
  modified_base 9: mod_base = OTHER; note = 2'-fluoroadenosine-3'-phosphate
  modified_base 10: mod_base = OTHER; note = 2'-O-methyladenosine-3'-phosphate
  modified_base 11: mod_base = OTHER; note = 2'-O-methylguanosine-3'-phosphate
  modified_base 12: mod_base = OTHER; note = 2'-O-methyluridine-3'-phosphate
  modified_base 13: mod_base = OTHER; note = 2'-O-methylguanosine-3'-phosphate
  modified_base 14: mod_base = OTHER; note = 2'-fluoroadenosine-3'-phosphate
  modified_base 15: mod_base = OTHER; note = 2'-O-methylguanosine-3'-phosphate
  modified_base 16: mod_base = OTHER; note = 2'-fluoroguanosine-3'-phosphate
  modified_base 17: mod_base = OTHER; note = 2'-O-methylguanosine-3'-phosphate
  modified_base 18: mod_base = OTHER; note = 2'-O-methyladenosine-3'-phosphate
  modified_base 19: mod_base = OTHER; note = 2'-O-methylguanosine-3'-phosphate
  modified_base 20: mod_base = OTHER; note = 2'-O-methylcytidine-3'-phosphate
  modified_base 21: mod_base = OTHER; note = 2'-O-methylguanosine-3'- phosphorothioate
  modified_base 22: mod_base = OTHER; note = 2'-O-methylguanosine-3'- phosphorothioate
  modified_base 23: mod_base = OTHER; note = 2'-O-methylguanosine-3'-phosphate
taagacccaagtgagggagcggg

SEQ ID NO: 1014 - DNA, 23 bp, synthetic construct
  source 1..23: mol_type = other DNA
  modified_base 1: mod_base = OTHER; note = Vinyl-phosphonate 2'-O-methyluridine-3'-phosphorothioate
  modified_base 2: mod_base = OTHER; note = 2'-deoxyadenosine-3'-phosphorothioate
  modified_base 3: mod_base = OTHER; note = 2'-O-methyladenosine-3'-phosphate
  modified_base 4: mod_base = OTHER; note = 2'-O-methylguanosine-3'-phosphate
  modified_base 6: mod_base = OTHER; note = 2'-O-methylcytidine-3'-phosphate
  modified_base 8: mod_base = OTHER; note = 2'-O-methylcytidine-3'-phosphate
  modified_base 9: mod_base = OTHER; note = 2'-O-methyladenosine-3'-phosphate
  modified_base 10: mod_base = OTHER; note = 2'-O-methyladenosine-3'-phosphate
  modified_base 11: mod_base = OTHER; note = 2'-O-methylguanosine-3'-phosphate
  modified_base 13: mod_base = OTHER; note = 2'-O-methylguanosine-3'-phosphate
  modified_base 14: mod_base = OTHER; note = 2'-fluoroadenosine-3'-phosphate
  modified_base 15: mod_base = OTHER; note = 2'-O-methylguanosine-3'-phosphate
  modified_base 16: mod_base = OTHER; note = 2'-O-methylguanosine-3'-phosphate
  modified_base 17: mod_base = OTHER; note = 2'-O-methylguanosine-3'-phosphate
  modified_base 18: mod_base = OTHER; note = 2'-O-methyladenosine-3'-phosphate
  modified_base 19: mod_base = OTHER; note = 2'-O-methylguanosine-3'-phosphate
  modified_base 20: mod_base = OTHER; note = 2'-O-methylcytidine-3'-phosphate
  modified_base 21: mod_base = OTHER; note = 2'-O-methylguanosine-3'- phosphorothioate
  modified_base 22: mod_base = OTHER; note = 2'-O-methylguanosine-3'- phosphorothioate
  modified_base 23: mod_base = OTHER; note = 2'-O-methylguanosine-3'-phosphate
  misc_feature 1: note = RNA
  misc_feature 2: note = DNA
  misc_feature 3..4: note = RNA
  misc_feature 5: note = DNA
  misc_feature 6: note = RNA
  misc_feature 7: note = DNA
  misc_feature 8..11: note = RNA
  misc_feature 12: note = DNA
  misc_feature 13..23: note = RNA
taagacccaagtgagggagcggg

SEQ ID NO: 1015 - DNA, 23 bp, synthetic construct
  source 1..23: mol_type = other DNA
  modified_base 1: mod_base = OTHER; note = Vinyl-phosphonate 2'-O-methyluridine-3'-phosphorothioate
  modified_base 2: mod_base = OTHER; note = 2'-fluoroguanosine-3'-phosphorothioate
  modified_base 3: mod_base = OTHER; note = 2'-O-methylguanosine-3'-phosphate
  modified_base 4: mod_base = OTHER; note = 2'-O-methyladenosine-3'-phosphate
  modified_base 6: mod_base = OTHER; note = 2'-O-methylguanosine-3'-phosphate
  modified_base 7: mod_base = OTHER; note = Adenosine-glycol nucleic acid (GNA) S-Isomer
  modified_base 8: mod_base = OTHER; note = 2'-O-methylcytidine-3'-phosphate
  modified_base 9: mod_base = OTHER; note = 2'-O-methylcytidine-3'-phosphate
  modified_base 10: mod_base = OTHER; note = 2'-O-methylcytidine-3'-phosphate
  modified_base 11: mod_base = OTHER; note = 2'-O-methyladenosine-3'-phosphate
  modified_base 12: mod_base = OTHER; note = 2'-O-methyladenosine-3'-phosphate
  modified_base 13: mod_base = OTHER; note = 2'-O-methylguanosine-3'-phosphate
  modified_base 14: mod_base = OTHER; note = 2'-fluorouridine-3'-phosphate
  modified_base 15: mod_base = OTHER; note = 2'-O-methylguanosine-3'-phosphate
  modified_base 16: mod_base = OTHER; note = 2'-fluoroadenosine-3'-phosphate
  modified_base 17: mod_base = OTHER; note = 2'-O-methylguanosine-3'-phosphate
  modified_base 18: mod_base = OTHER; note = 2'-O-methylguanosine-3'-phosphate
  modified_base 19: mod_base = OTHER; note = 2'-O-methylguanosine-3'-phosphate
  modified_base 20: mod_base = OTHER; note = 2'-O-methyladenosine-3'-phosphate
  modified_base 21: mod_base = OTHER; note = 2'-O-methylguanosine-3'- phosphorothioate
  modified_base 22: mod_base = OTHER; note = 2'-O-methylcytidine-3'- phosphorothioate
  modified_base 23: mod_base = OTHER; note = 2'-O-methylguanosine-3'-phosphate
  misc_feature 1..4: note = RNA
  misc_feature 5: note = DNA
  misc_feature 6..23: note = RNA
tggaagacccaagtgagggagcg

SEQ ID NO: 1016 - DNA, 23 bp, synthetic construct
  source 1..23: mol_type = other DNA
  modified_base 1: mod_base = OTHER; note = Vinyl-phosphonate 2'-O-methyluridine-3'-phosphorothioate
  modified_base 2: mod_base = OTHER; note = 2'-fluoroadenosine-3'-phosphorothioate
  modified_base 3: mod_base = OTHER; note = 2'-O-methylguanosine-3'-phosphate
  modified_base 4: mod_base = OTHER; note = 2'-O-methylguanosine-3'-phosphate
  modified_base 6: mod_base = OTHER; note = 2'-O-methyladenosine-3'-phosphate
  modified_base 7: mod_base = OTHER; note = Adenosine-glycol nucleic acid (GNA) S-Isomer
  modified_base 8: mod_base = OTHER; note = 2'-O-methylguanosine-3'-phosphate
  modified_base 9: mod_base = OTHER; note = 2'-O-methyladenosine-3'-phosphate
  modified_base 10: mod_base = OTHER; note = 2'-O-methylcytidine-3'-phosphate
  modified_base 11: mod_base = OTHER; note = 2'-O-methylcytidine-3'-phosphate
  modified_base 12: mod_base = OTHER; note = 2'-O-methylcytidine-3'-phosphate
  modified_base 13: mod_base = OTHER; note = 2'-O-methyladenosine-3'-phosphate
  modified_base 14: mod_base = OTHER; note = 2'-fluoroadenosine-3'-phosphate
  modified_base 15: mod_base = OTHER; note = 2'-O-methylguanosine-3'-phosphate
  modified_base 16: mod_base = OTHER; note = 2'-fluorouridine-3'-phosphate
  modified_base 17: mod_base = OTHER; note = 2'-O-methylguanosine-3'-phosphate
  modified_base 18: mod_base = OTHER; note = 2'-O-methyladenosine-3'-phosphate
  modified_base 19: mod_base = OTHER; note = 2'-O-methylguanosine-3'-phosphate
  modified_base 20: mod_base = OTHER; note = 2'-O-methylguanosine-3'-phosphate
  modified_base 21: mod_base = OTHER; note = 2'-O-methylguanosine-3'- phosphorothioate
  modified_base 22: mod_base = OTHER; note = 2'-O-methyladenosine-3'- phosphorothioate
  modified_base 23: mod_base = OTHER; note = 2'-O-methylguanosine-3'-phosphate
  misc_feature 1..4: note = RNA
  misc_feature 5: note = DNA
  misc_feature 6..23: note = RNA
tagggaagacccaagtgagggag

SEQ ID NO: 1017 - DNA, 23 bp, synthetic construct
  source 1..23: mol_type = other DNA
  modified_base 1: mod_base = OTHER; note = Vinyl-phosphonate 2'-O-methyluridine-3'-phosphorothioate
  modified_base 2: mod_base = OTHER; note = 2'-fluoroadenosine-3'-phosphorothioate
  modified_base 3: mod_base = OTHER; note = 2'-O-methyladenosine-3'-phosphate
  modified_base 4: mod_base = OTHER; note = 2'-O-methylguanosine-3'-phosphate
  modified_base 6: mod_base = OTHER; note = 2'-O-methylguanosine-3'-phosphate
  modified_base 7: mod_base = OTHER; note = Adenosine-glycol nucleic acid (GNA) S-Isomer
  modified_base 8: mod_base = OTHER; note = 2'-O-methyladenosine-3'-phosphate
  modified_base 9: mod_base = OTHER; note = 2'-O-methylguanosine-3'-phosphate
  modified_base 10: mod_base = OTHER; note = 2'-O-methyladenosine-3'-phosphate
  modified_base 11: mod_base = OTHER; note = 2'-O-methylcytidine-3'-phosphate
  modified_base 12: mod_base = OTHER; note = 2'-O-methylcytidine-3'-phosphate
  modified_base 13: mod_base = OTHER; note = 2'-O-methylcytidine-3'-phosphate
  modified_base 14: mod_base = OTHER; note = 2'-fluoroadenosine-3'-phosphate
  modified_base 15: mod_base = OTHER; note = 2'-O-methyladenosine-3'-phosphate
  modified_base 16: mod_base = OTHER; note = 2'-fluoroguanosine-3'-phosphate
  modified_base 17: mod_base = OTHER; note = 2'-O-methyluridine-3'-phosphate
  modified_base 18: mod_base = OTHER; note = 2'-O-methylguanosine-3'-phosphate
  modified_base 19: mod_base = OTHER; note = 2'-O-methyladenosine-3'-phosphate
  modified_base 20: mod_base = OTHER; note = 2'-O-methylguanosine-3'-phosphate
  modified_base 21: mod_base = OTHER; note = 2'-O-methylguanosine-3'- phosphorothioate
  modified_base 22: mod_base = OTHER; note = 2'-O-methylguanosine-3'- phosphorothioate
  modified_base 23: mod_base = OTHER; note = 2'-O-methyladenosine-3'-phosphate
  misc_feature 1..4: note = RNA
  misc_feature 5: note = DNA
  misc_feature 6..23: note = RNA
taagggaagacccaagtgaggga

SEQ ID NO: 1018 - RNA, 23 nt, synthetic construct
  source 1..23: mol_type = other RNA
  modified_base 1: mod_base = OTHER; note = Vinyl-phosphonate 2'-O-methyluridine-3'-phosphorothioate
  modified_base 2: mod_base = OTHER; note = 2'-fluoroadenosine-3'-phosphorothioate
  modified_base 3: mod_base = OTHER; note = 2'-O-methyladenosine-3'-phosphate
  modified_base 4: mod_base = OTHER; note = 2'-O-methylguanosine-3'-phosphate
  modified_base 5: mod_base = OTHER; note = 2'-O-methylguanosine-3'-phosphate
  modified_base 6: mod_base = OTHER; note = 2'-fluoroguanosine-3'-phosphate
  modified_base 7: mod_base = OTHER; note = 2'-O-methyladenosine-3'-phosphate
  modified_base 8: mod_base = OTHER; note = 2'-fluoroadenosine-3'-phosphate
  modified_base 9: mod_base = OTHER; note = 2'-fluoroguanosine-3'-phosphate
  modified_base 10: mod_base = OTHER; note = 2'-O-methyladenosine-3'-phosphate
  modified_base 11: mod_base = OTHER; note = 2'-O-methylcytidine-3'-phosphate
  modified_base 12: mod_base = OTHER; note = 2'-O-methylcytidine-3'-phosphate
  modified_base 13: mod_base = OTHER; note = 2'-O-methylcytidine-3'-phosphate
  modified_base 14: mod_base = OTHER; note = 2'-fluoroadenosine-3'-phosphate
  modified_base 15: mod_base = OTHER; note = 2'-O-methyladenosine-3'-phosphate
  modified_base 16: mod_base = OTHER; note = 2'-fluoroguanosine-3'-phosphate
  modified_base 17: mod_base = OTHER; note = 2'-O-methyluridine-3'-phosphate
  modified_base 18: mod_base = OTHER; note = 2'-O-methylguanosine-3'-phosphate
  modified_base 19: mod_base = OTHER; note = 2'-O-methyladenosine-3'-phosphate
  modified_base 20: mod_base = OTHER; note = 2'-O-methylguanosine-3'-phosphate
  modified_base 21: mod_base = OTHER; note = 2'-O-methylguanosine-3'- phosphorothioate
  modified_base 22: mod_base = OTHER; note = 2'-O-methylguanosine-3'- phosphorothioate
  modified_base 23: mod_base = OTHER; note = 2'-O-methyladenosine-3'-phosphate
taagggaagacccaagtgaggga

SEQ ID NO: 1019 - DNA, 23 bp, synthetic construct
  source 1..23: mol_type = other DNA
  modified_base 1: mod_base = OTHER; note = Vinyl-phosphonate 2'-O-methyluridine-3'-phosphorothioate
  modified_base 2: mod_base = OTHER; note = 2'-deoxyadenosine-3'-phosphorothioate
  modified_base 3: mod_base = OTHER; note = 2'-O-methyladenosine-3'-phosphate
  modified_base 4: mod_base = OTHER; note = 2'-O-methylguanosine-3'-phosphate
  modified_base 6: mod_base = OTHER; note = 2'-O-methylguanosine-3'-phosphate
  modified_base 8: mod_base = OTHER; note = 2'-O-methyladenosine-3'-phosphate
  modified_base 9: mod_base = OTHER; note = 2'-O-methylguanosine-3'-phosphate
  modified_base 10: mod_base = OTHER; note = 2'-O-methyladenosine-3'-phosphate
  modified_base 11: mod_base = OTHER; note = 2'-O-methylcytidine-3'-phosphate
  modified_base 13: mod_base = OTHER; note = 2'-O-methylcytidine-3'-phosphate
  modified_base 14: mod_base = OTHER; note = 2'-fluoroadenosine-3'-phosphate
  modified_base 15: mod_base = OTHER; note = 2'-O-methyladenosine-3'-phosphate
  modified_base 16: mod_base = OTHER; note = 2'-O-methylguanosine-3'-phosphate
  modified_base 17: mod_base = OTHER; note = 2'-O-methyluridine-3'-phosphate
  modified_base 18: mod_base = OTHER; note = 2'-O-methylguanosine-3'-phosphate
  modified_base 19: mod_base = OTHER; note = 2'-O-methyladenosine-3'-phosphate
  modified_base 20: mod_base = OTHER; note = 2'-O-methylguanosine-3'-phosphate
  modified_base 21: mod_base = OTHER; note = 2'-O-methylguanosine-3'- phosphorothioate
  modified_base 22: mod_base = OTHER; note = 2'-O-methylguanosine-3'- phosphorothioate
  modified_base 23: mod_base = OTHER; note = 2'-O-methyladenosine-3'-phosphate
  misc_feature 1: note = RNA
  misc_feature 2: note = DNA
  misc_feature 3..4: note = RNA
  misc_feature 5: note = DNA
  misc_feature 6: note = RNA
  misc_feature 7: note = DNA
  misc_feature 8..11: note = RNA
  misc_feature 12: note = DNA
  misc_feature 13..23: note = RNA
taagggaagacccaagtgaggga

SEQ ID NO: 1020 - RNA, 23 nt, synthetic construct
  source 1..23: mol_type = other RNA
  modified_base 1: mod_base = OTHER; note = Vinyl-phosphonate 2'-O-methyluridine-3'-phosphorothioate
  modified_base 2: mod_base = OTHER; note = 2'-fluoroguanosine-3'-phosphorothioate
  modified_base 3: mod_base = OTHER; note = 2'-O-methyladenosine-3'-phosphate
  modified_base 4: mod_base = OTHER; note = 2'-O-methylcytidine-3'-phosphate
  modified_base 5: mod_base = OTHER; note = 2'-O-methyladenosine-3'-phosphate
  modified_base 6: mod_base = OTHER; note = 2'-fluoroadenosine-3'-phosphate
  modified_base 7: mod_base = OTHER; note = 2'-O-methylguanosine-3'-phosphate
  modified_base 8: mod_base = OTHER; note = 2'-fluoroguanosine-3'-phosphate
  modified_base 9: mod_base = OTHER; note = 2'-fluoroguanosine-3'-phosphate
  modified_base 10: mod_base = OTHER; note = 2'-O-methyladenosine-3'-phosphate
  modified_base 11: mod_base = OTHER; note = 2'-O-methyladenosine-3'-phosphate
  modified_base 12: mod_base = OTHER; note = 2'-O-methylguanosine-3'-phosphate
  modified_base 13: mod_base = OTHER; note = 2'-O-methyladenosine-3'-phosphate
  modified_base 14: mod_base = OTHER; note = 2'-fluorocytidine-3'-phosphate
  modified_base 15: mod_base = OTHER; note = 2'-O-methylcytidine-3'-phosphate
  modified_base 16: mod_base = OTHER; note = 2'-fluorocytidine-3'-phosphate
  modified_base 17: mod_base = OTHER; note = 2'-O-methyladenosine-3'-phosphate
  modified_base 18: mod_base = OTHER; note = 2'-O-methyladenosine-3'-phosphate
  modified_base 19: mod_base = OTHER; note = 2'-O-methylguanosine-3'-phosphate
  modified_base 20: mod_base = OTHER; note = 2'-O-methyluridine-3'-phosphate
  modified_base 21: mod_base = OTHER; note = 2'-O-methylguanosine-3'- phosphorothioate
  modified_base 22: mod_base = OTHER; note = 2'-O-methyladenosine-3'- phosphorothioate
  modified_base 23: mod_base = OTHER; note = 2'-O-methylguanosine-3'-phosphate
tgacaagggaagacccaagtgag

SEQ ID NO: 1021 - DNA, 23 bp, synthetic construct
  source 1..23: mol_type = other DNA
  modified_base 1: mod_base = OTHER; note = Vinyl-phosphonate 2'-O-methyluridine-3'-phosphorothioate
  modified_base 2: mod_base = OTHER; note = 2'-deoxyguanosine-3'-phosphorothioate
  modified_base 3: mod_base = OTHER; note = 2'-O-methyladenosine-3'-phosphate
  modified_base 4: mod_base = OTHER; note = 2'-O-methylcytidine-3'-phosphate
  modified_base 6: mod_base = OTHER; note = 2'-O-methyladenosine-3'-phosphate
  modified_base 8: mod_base = OTHER; note = 2'-O-methylguanosine-3'-phosphate
  modified_base 9: mod_base = OTHER; note = 2'-O-methylguanosine-3'-phosphate
  modified_base 10: mod_base = OTHER; note = 2'-O-methyladenosine-3'-phosphate
  modified_base 11: mod_base = OTHER; note = 2'-O-methyladenosine-3'-phosphate
  modified_base 13: mod_base = OTHER; note = 2'-O-methyladenosine-3'-phosphate
  modified_base 14: mod_base = OTHER; note = 2'-fluorocytidine-3'-phosphate
  modified_base 15: mod_base = OTHER; note = 2'-O-methylcytidine-3'-phosphate
  modified_base 16: mod_base = OTHER; note = 2'-O-methylcytidine-3'-phosphate
  modified_base 17: mod_base = OTHER; note = 2'-O-methyladenosine-3'-phosphate
  modified_base 18: mod_base = OTHER; note = 2'-O-methyladenosine-3'-phosphate
  modified_base 19: mod_base = OTHER; note = 2'-O-methylguanosine-3'-phosphate
  modified_base 20: mod_base = OTHER; note = 2'-O-methyluridine-3'-phosphate
  modified_base 21: mod_base = OTHER; note = 2'-O-methylguanosine-3'- phosphorothioate
  modified_base 22: mod_base = OTHER; note = 2'-O-methyladenosine-3'- phosphorothioate
  modified_base 23: mod_base = OTHER; note = 2'-O-methylguanosine-3'-phosphate
  misc_feature 1: note = RNA
  misc_feature 2: note = DNA
  misc_feature 3..4: note = RNA
  misc_feature 5: note = DNA
  misc_feature 6: note = RNA
  misc_feature 7: note = DNA
  misc_feature 8..11: note = RNA
  misc_feature 12: note = DNA
  misc_feature 13..23: note = RNA
tgacaagggaagacccaagtgag

SEQ ID NO: 1022 - DNA, 23 bp, synthetic construct
  source 1..23: mol_type = other DNA
  modified_base 1: mod_base = OTHER; note = Vinyl-phosphonate 2'-O-methyluridine-3'-phosphorothioate
  modified_base 2: mod_base = OTHER; note = 2'-fluoroguanosine-3'-phosphorothioate
  modified_base 3: mod_base = OTHER; note = 2'-O-methylguanosine-3'-phosphate
  modified_base 4: mod_base = OTHER; note = 2'-O-methyladenosine-3'-phosphate
  modified_base 6: mod_base = OTHER; note = 2'-O-methyladenosine-3'-phosphate
  modified_base 7: mod_base = OTHER; note = Adenosine-glycol nucleic acid (GNA) S-Isomer
  modified_base 8: mod_base = OTHER; note = 2'-O-methylguanosine-3'-phosphate
  modified_base 9: mod_base = OTHER; note = 2'-O-methylguanosine-3'-phosphate
  modified_base 10: mod_base = OTHER; note = 2'-O-methylguanosine-3'-phosphate
  modified_base 11: mod_base = OTHER; note = 2'-O-methyladenosine-3'-phosphate
  modified_base 12: mod_base = OTHER; note = 2'-O-methyladenosine-3'-phosphate
  modified_base 13: mod_base = OTHER; note = 2'-O-methylguanosine-3'-phosphate
  modified_base 14: mod_base = OTHER; note = 2'-fluoroadenosine-3'-phosphate
  modified_base 15: mod_base = OTHER; note = 2'-O-methylcytidine-3'-phosphate
  modified_base 16: mod_base = OTHER; note = 2'-fluorocytidine-3'-phosphate
  modified_base 17: mod_base = OTHER; note = 2'-O-methylcytidine-3'-phosphate
  modified_base 18: mod_base = OTHER; note = 2'-O-methyladenosine-3'-phosphate
  modified_base 19: mod_base = OTHER; note = 2'-O-methyladenosine-3'-phosphate
  modified_base 20: mod_base = OTHER; note = 2'-O-methylguanosine-3'-phosphate
  modified_base 21: mod_base = OTHER; note = 2'-O-methyluridine-3'-phosphorothioate
  modified_base 22: mod_base = OTHER; note = 2'-O-methylguanosine-3'- phosphorothioate
  modified_base 23: mod_base = OTHER; note = 2'-O-methyladenosine-3'-phosphate
  misc_feature 1..4: note = RNA
  misc_feature 5: note = DNA
  misc_feature 6..23: note = RNA
tggacaagggaagacccaagtga

SEQ ID NO: 1023 - RNA, 23 nt, synthetic construct
  source 1..23: mol_type = other RNA
  modified_base 1: mod_base = OTHER; note = Vinyl-phosphonate 2'-O-methyluridine-3'-phosphorothioate
  modified_base 2: mod_base = OTHER; note = 2'-fluoroguanosine-3'-phosphorothioate
  modified_base 3: mod_base = OTHER; note = 2'-O-methylguanosine-3'-phosphate
  modified_base 4: mod_base = OTHER; note = 2'-O-methyladenosine-3'-phosphate
  modified_base 5: mod_base = OTHER; note = 2'-O-methylcytidine-3'-phosphate
  modified_base 6: mod_base = OTHER; note = 2'-fluoroadenosine-3'-phosphate
  modified_base 7: mod_base = OTHER; note = 2'-O-methyladenosine-3'-phosphate
  modified_base 8: mod_base = OTHER; note = 2'-fluoroguanosine-3'-phosphate
  modified_base 9: mod_base = OTHER; note = 2'-fluoroguanosine-3'-phosphate
  modified_base 10: mod_base = OTHER; note = 2'-O-methylguanosine-3'-phosphate
  modified_base 11: mod_base = OTHER; note = 2'-O-methyladenosine-3'-phosphate
  modified_base 12: mod_base = OTHER; note = 2'-O-methyladenosine-3'-phosphate
  modified_base 13: mod_base = OTHER; note = 2'-O-methylguanosine-3'-phosphate
  modified_base 14: mod_base = OTHER; note = 2'-fluoroadenosine-3'-phosphate
  modified_base 15: mod_base = OTHER; note = 2'-O-methylcytidine-3'-phosphate
  modified_base 16: mod_base = OTHER; note = 2'-fluorocytidine-3'-phosphate
  modified_base 17: mod_base = OTHER; note = 2'-O-methylcytidine-3'-phosphate
  modified_base 18: mod_base = OTHER; note = 2'-O-methyladenosine-3'-phosphate
  modified_base 19: mod_base = OTHER; note = 2'-O-methyladenosine-3'-phosphate
  modified_base 20: mod_base = OTHER; note = 2'-O-methylguanosine-3'-phosphate
  modified_base 21: mod_base = OTHER; note = 2'-O-methyluridine-3'-phosphorothioate
  modified_base 22: mod_base = OTHER; note = 2'-O-methylguanosine-3'- phosphorothioate
  modified_base 23: mod_base = OTHER; note = 2'-O-methyladenosine-3'-phosphate
tggacaagggaagacccaagtga

SEQ ID NO: 1024 - DNA, 23 bp, synthetic construct
  source 1..23: mol_type = other DNA
  modified_base 1: mod_base = OTHER; note = Vinyl-phosphonate 2'-O-methyluridine-3'-phosphorothioate
  modified_base 2: mod_base = OTHER; note = 2'-deoxyguanosine-3'-phosphorothioate
  modified_base 3: mod_base = OTHER; note = 2'-O-methylguanosine-3'-phosphate
  modified_base 4: mod_base = OTHER; note = 2'-O-methyladenosine-3'-phosphate
  modified_base 6: mod_base = OTHER; note = 2'-O-methyladenosine-3'-phosphate
  modified_base 8: mod_base = OTHER; note = 2'-O-methylguanosine-3'-phosphate
  modified_base 9: mod_base = OTHER; note = 2'-O-methylguanosine-3'-phosphate
  modified_base 10: mod_base = OTHER; note = 2'-O-methylguanosine-3'-phosphate
  modified_base 11: mod_base = OTHER; note = 2'-O-methyladenosine-3'-phosphate
  modified_base 13: mod_base = OTHER; note = 2'-O-methylguanosine-3'-phosphate
  modified_base 14: mod_base = OTHER; note = 2'-fluoroadenosine-3'-phosphate
  modified_base 15: mod_base = OTHER; note = 2'-O-methylcytidine-3'-phosphate
  modified_base 16: mod_base = OTHER; note = 2'-O-methylcytidine-3'-phosphate
  modified_base 17: mod_base = OTHER; note = 2'-O-methylcytidine-3'-phosphate
  modified_base 18: mod_base = OTHER; note = 2'-O-methyladenosine-3'-phosphate
  modified_base 19: mod_base = OTHER; note = 2'-O-methyladenosine-3'-phosphate
  modified_base 20: mod_base = OTHER; note = 2'-O-methylguanosine-3'-phosphate
  modified_base 21: mod_base = OTHER; note = 2'-O-methyluridine-3'-phosphorothioate
  modified_base 22: mod_base = OTHER; note = 2'-O-methylguanosine-3'- phosphorothioate
  modified_base 23: mod_base = OTHER; note = 2'-O-methyladenosine-3'-phosphate
  misc_feature 1: note = RNA
  misc_feature 2: note = DNA
  misc_feature 3..4: note = RNA
  misc_feature 5: note = DNA
  misc_feature 6: note = RNA
  misc_feature 7: note = DNA
  misc_feature 8..11: note = RNA
  misc_feature 12: note = DNA
  misc_feature 13..23: note = RNA
tggacaagggaagacccaagtga

SEQ ID NO: 1025 - RNA, 23 nt, synthetic construct
  source 1..23: mol_type = other RNA
  modified_base 1: mod_base = OTHER; note = Vinyl-phosphonate 2'-O-methyluridine-3'-phosphorothioate
  modified_base 2: mod_base = OTHER; note = 2'-fluoroadenosine-3'-phosphorothioate
  modified_base 3: mod_base = OTHER; note = 2'-O-methylguanosine-3'-phosphate
  modified_base 4: mod_base = OTHER; note = 2'-O-methylguanosine-3'-phosphate
  modified_base 5: mod_base = OTHER; note = 2'-O-methyladenosine-3'-phosphate
  modified_base 6: mod_base = OTHER; note = 2'-fluorocytidine-3'-phosphate
  modified_base 7: mod_base = OTHER; note = 2'-O-methyladenosine-3'-phosphate
  modified_base 8: mod_base = OTHER; note = 2'-fluoroadenosine-3'-phosphate
  modified_base 9: mod_base = OTHER; note = 2'-fluoroguanosine-3'-phosphate
  modified_base 10: mod_base = OTHER; note = 2'-O-methylguanosine-3'-phosphate
  modified_base 11: mod_base = OTHER; note = 2'-O-methylguanosine-3'-phosphate
  modified_base 12: mod_base = OTHER; note = 2'-O-methyladenosine-3'-phosphate
  modified_base 13: mod_base = OTHER; note = 2'-O-methyladenosine-3'-phosphate
  modified_base 14: mod_base = OTHER; note = 2'-fluoroguanosine-3'-phosphate
  modified_base 15: mod_base = OTHER; note = 2'-O-methyladenosine-3'-phosphate
  modified_base 16: mod_base = OTHER; note = 2'-fluorocytidine-3'-phosphate
  modified_base 17: mod_base = OTHER; note = 2'-O-methylcytidine-3'-phosphate
  modified_base 18: mod_base = OTHER; note = 2'-O-methylcytidine-3'-phosphate
  modified_base 19: mod_base = OTHER; note = 2'-O-methyladenosine-3'-phosphate
  modified_base 20: mod_base = OTHER; note = 2'-O-methyladenosine-3'-phosphate
  modified_base 21: mod_base = OTHER; note = 2'-O-methylguanosine-3'- phosphorothioate
  modified_base 22: mod_base = OTHER; note = 2'-O-methyluridine-3'-phosphorothioate
  modified_base 23: mod_base = OTHER; note = 2'-O-methylguanosine-3'-phosphate
taggacaagggaagacccaagtg

SEQ ID NO: 1026 - DNA, 23 bp, synthetic construct
  source 1..23: mol_type = other DNA
  modified_base 1: mod_base = OTHER; note = Vinyl-phosphonate 2'-O-methyluridine-3'-phosphorothioate
  modified_base 2: mod_base = OTHER; note = 2'-deoxyadenosine-3'-phosphorothioate
  modified_base 3: mod_base = OTHER; note = 2'-O-methylguanosine-3'-phosphate
  modified_base 4: mod_base = OTHER; note = 2'-O-methylguanosine-3'-phosphate
  modified_base 6: mod_base = OTHER; note = 2'-O-methylcytidine-3'-phosphate
  modified_base 8: mod_base = OTHER; note = 2'-O-methyladenosine-3'-phosphate
  modified_base 9: mod_base = OTHER; note = 2'-O-methylguanosine-3'-phosphate
  modified_base 10: mod_base = OTHER; note = 2'-O-methylguanosine-3'-phosphate
  modified_base 11: mod_base = OTHER; note = 2'-O-methylguanosine-3'-phosphate
  modified_base 13: mod_base = OTHER; note = 2'-O-methyladenosine-3'-phosphate
  modified_base 14: mod_base = OTHER; note = 2'-fluoroguanosine-3'-phosphate
  modified_base 15: mod_base = OTHER; note = 2'-O-methyladenosine-3'-phosphate
  modified_base 16: mod_base = OTHER; note = 2'-O-methylcytidine-3'-phosphate
  modified_base 17: mod_base = OTHER; note = 2'-O-methylcytidine-3'-phosphate
  modified_base 18: mod_base = OTHER; note = 2'-O-methylcytidine-3'-phosphate
  modified_base 19: mod_base = OTHER; note = 2'-O-methyladenosine-3'-phosphate
  modified_base 20: mod_base = OTHER; note = 2'-O-methyladenosine-3'-phosphate
  modified_base 21: mod_base = OTHER; note = 2'-O-methylguanosine-3'- phosphorothioate
  modified_base 22: mod_base = OTHER; note = 2'-O-methyluridine-3'-phosphorothioate
  modified_base 23: mod_base = OTHER; note = 2'-O-methylguanosine-3'-phosphate
  misc_feature 1: note = RNA
  misc_feature 2: note = DNA
  misc_feature 3..4: note = RNA
  misc_feature 5: note = DNA
  misc_feature 6: note = RNA
  misc_feature 7: note = DNA
  misc_feature 8..11: note = RNA
  misc_feature 12: note = DNA
  misc_feature 13..23: note = RNA
taggacaagggaagacccaagtg

SEQ ID NO: 1027 - DNA, 23 bp, synthetic construct
  source 1..23: mol_type = other DNA
  modified_base 1: mod_base = OTHER; note = Vinyl-phosphonate 2'-O-methyluridine-3'-phosphorothioate
  modified_base 2: mod_base = OTHER; note = 2'-fluoroadenosine-3'-phosphorothioate
  modified_base 3: mod_base = OTHER; note = 2'-O-methylguanosine-3'-phosphate
  modified_base 4: mod_base = OTHER; note = 2'-O-methyladenosine-3'-phosphate
  modified_base 6: mod_base = OTHER; note = 2'-O-methylguanosine-3'-phosphate
  modified_base 7: mod_base = OTHER; note = Adenosine-glycol nucleic acid (GNA) S-Isomer
  modified_base 8: mod_base = OTHER; note = 2'-O-methylcytidine-3'-phosphate
  modified_base 9: mod_base = OTHER; note = 2'-O-methyladenosine-3'-phosphate
  modified_base 10: mod_base = OTHER; note = 2'-O-methyladenosine-3'-phosphate
  modified_base 11: mod_base = OTHER; note = 2'-O-methylguanosine-3'-phosphate
  modified_base 12: mod_base = OTHER; note = 2'-O-methylguanosine-3'-phosphate
  modified_base 13: mod_base = OTHER; note = 2'-O-methylguanosine-3'-phosphate
  modified_base 14: mod_base = OTHER; note = 2'-fluoroadenosine-3'-phosphate
  modified_base 15: mod_base = OTHER; note = 2'-O-methyladenosine-3'-phosphate
  modified_base 16: mod_base = OTHER; note = 2'-fluoroguanosine-3'-phosphate
  modified_base 17: mod_base = OTHER; note = 2'-O-methyladenosine-3'-phosphate
  modified_base 18: mod_base = OTHER; note = 2'-O-methylcytidine-3'-phosphate
  modified_base 19: mod_base = OTHER; note = 2'-O-methylcytidine-3'-phosphate
  modified_base 20: mod_base = OTHER; note = 2'-O-methylcytidine-3'-phosphate
  modified_base 21: mod_base = OTHER; note = 2'-O-methyladenosine-3'- phosphorothioate
  modified_base 22: mod_base = OTHER; note = 2'-O-methyladenosine-3'- phosphorothioate
  modified_base 23: mod_base = OTHER; note = 2'-O-methylguanosine-3'-phosphate
  misc_feature 1..4: note = RNA
  misc_feature 5: note = DNA
  misc_feature 6..23: note = RNA
tagaggacaagggaagacccaag

SEQ ID NO: 1028 - DNA, 23 bp, synthetic construct
  source 1..23: mol_type = other DNA
  modified_base 1: mod_base = OTHER; note = Vinyl-phosphonate 2'-O-methyluridine-3'-phosphorothioate
  modified_base 2: mod_base = OTHER; note = 2'-fluoroguanosine-3'-phosphorothioate
  modified_base 3: mod_base = OTHER; note = 2'-O-methylcytidine-3'-phosphate
  modified_base 4: mod_base = OTHER; note = 2'-O-methylguanosine-3'-phosphate
  modified_base 6: mod_base = OTHER; note = 2'-O-methylguanosine-3'-phosphate
  modified_base 7: mod_base = OTHER; note = Adenosine-glycol nucleic acid (GNA) S-Isomer
  modified_base 8: mod_base = OTHER; note = 2'-O-methylguanosine-3'-phosphate
  modified_base 9: mod_base = OTHER; note = 2'-O-methylguanosine-3'-phosphate
  modified_base 10: mod_base = OTHER; note = 2'-O-methyladenosine-3'-phosphate
  modified_base 11: mod_base = OTHER; note = 2'-O-methylcytidine-3'-phosphate
  modified_base 12: mod_base = OTHER; note = 2'-O-methyladenosine-3'-phosphate
  modified_base 13: mod_base = OTHER; note = 2'-O-methyladenosine-3'-phosphate
  modified_base 14: mod_base = OTHER; note = 2'-fluoroguanosine-3'-phosphate
  modified_base 15: mod_base = OTHER; note = 2'-O-methylguanosine-3'-phosphate
  modified_base 16: mod_base = OTHER; note = 2'-fluoroguanosine-3'-phosphate
  modified_base 17: mod_base = OTHER; note = 2'-O-methyladenosine-3'-phosphate
  modified_base 18: mod_base = OTHER; note = 2'-O-methyladenosine-3'-phosphate
  modified_base 19: mod_base = OTHER; note = 2'-O-methylguanosine-3'-phosphate
  modified_base 20: mod_base = OTHER; note = 2'-O-methyladenosine-3'-phosphate
  modified_base 21: mod_base = OTHER; note = 2'-O-methylcytidine-3'- phosphorothioate
  modified_base 22: mod_base = OTHER; note = 2'-O-methylcytidine-3'- phosphorothioate
  modified_base 23: mod_base = OTHER; note = 2'-O-methylcytidine-3'-phosphate
  misc_feature 1..4: note = RNA
  misc_feature 5: note = DNA
  misc_feature 6..23: note = RNA
tgcgagaggacaagggaagaccc

SEQ ID NO: 1029 - RNA, 23 nt, synthetic construct
  source 1..23: mol_type = other RNA
  modified_base 1: mod_base = OTHER; note = Vinyl-phosphonate 2'-O-methyluridine-3'-phosphorothioate
  modified_base 2: mod_base = OTHER; note = 2'-fluorocytidine-3'-phosphorothioate
  modified_base 3: mod_base = OTHER; note = 2'-O-methylguanosine-3'-phosphate
  modified_base 4: mod_base = OTHER; note = 2'-O-methylcytidine-3'-phosphate
  modified_base 5: mod_base = OTHER; note = 2'-O-methylguanosine-3'-phosphate
  modified_base 6: mod_base = OTHER; note = 2'-fluoroadenosine-3'-phosphate
  modified_base 7: mod_base = OTHER; note = 2'-O-methylguanosine-3'-phosphate
  modified_base 8: mod_base = OTHER; note = 2'-fluoroadenosine-3'-phosphate
  modified_base 9: mod_base = OTHER; note = 2'-fluoroguanosine-3'-phosphate
  modified_base 10: mod_base = OTHER; note = 2'-O-methylguanosine-3'-phosphate
  modified_base 11: mod_base = OTHER; note = 2'-O-methyladenosine-3'-phosphate
  modified_base 12: mod_base = OTHER; note = 2'-O-methylcytidine-3'-phosphate
  modified_base 13: mod_base = OTHER; note = 2'-O-methyladenosine-3'-phosphate
  modified_base 14: mod_base = OTHER; note = 2'-fluoroadenosine-3'-phosphate
  modified_base 15: mod_base = OTHER; note = 2'-O-methylguanosine-3'-phosphate
  modified_base 16: mod_base = OTHER; note = 2'-fluoroguanosine-3'-phosphate
  modified_base 17: mod_base = OTHER; note = 2'-O-methylguanosine-3'-phosphate
  modified_base 18: mod_base = OTHER; note = 2'-O-methyladenosine-3'-phosphate
  modified_base 19: mod_base = OTHER; note = 2'-O-methyladenosine-3'-phosphate
  modified_base 20: mod_base = OTHER; note = 2'-O-methylguanosine-3'-phosphate
  modified_base 21: mod_base = OTHER; note = 2'-O-methyladenosine-3'- phosphorothioate
  modified_base 22: mod_base = OTHER; note = 2'-O-methylcytidine-3'- phosphorothioate
  modified_base 23: mod_base = OTHER; note = 2'-O-methylcytidine-3'-phosphate
tcgcgagaggacaagggaagacc

SEQ ID NO: 1030 - DNA, 23 bp, synthetic construct
  source 1..23: mol_type = other DNA
  modified_base 1: mod_base = OTHER; note = Vinyl-phosphonate 2'-O-methyluridine-3'-phosphorothioate
  modified_base 2: mod_base = OTHER; note = 2'-deoxycytidine-3'-phosphorothioate
  modified_base 3: mod_base = OTHER; note = 2'-O-methylguanosine-3'-phosphate
  modified_base 4: mod_base = OTHER; note = 2'-O-methylcytidine-3'-phosphate
  modified_base 6: mod_base = OTHER; note = 2'-O-methyladenosine-3'-phosphate
  modified_base 8: mod_base = OTHER; note = 2'-O-methyladenosine-3'-phosphate
  modified_base 9: mod_base = OTHER; note = 2'-O-methylguanosine-3'-phosphate
  modified_base 10: mod_base = OTHER; note = 2'-O-methylguanosine-3'-phosphate
  modified_base 11: mod_base = OTHER; note = 2'-O-methyladenosine-3'-phosphate
  modified_base 13: mod_base = OTHER; note = 2'-O-methyladenosine-3'-phosphate
  modified_base 14: mod_base = OTHER; note = 2'-fluoroadenosine-3'-phosphate
  modified_base 15: mod_base = OTHER; note = 2'-O-methylguanosine-3'-phosphate
  modified_base 16: mod_base = OTHER; note = 2'-O-methylguanosine-3'-phosphate
  modified_base 17: mod_base = OTHER; note = 2'-O-methylguanosine-3'-phosphate
  modified_base 18: mod_base = OTHER; note = 2'-O-methyladenosine-3'-phosphate
  modified_base 19: mod_base = OTHER; note = 2'-O-methyladenosine-3'-phosphate
  modified_base 20: mod_base = OTHER; note = 2'-O-methylguanosine-3'-phosphate
  modified_base 21: mod_base = OTHER; note = 2'-O-methyladenosine-3'- phosphorothioate
  modified_base 22: mod_base = OTHER; note = 2'-O-methylcytidine-3'- phosphorothioate
  modified_base 23: mod_base = OTHER; note = 2'-O-methylcytidine-3'-phosphate
  misc_feature 1: note = RNA
  misc_feature 2: note = DNA
  misc_feature 3..4: note = RNA
  misc_feature 5: note = DNA
  misc_feature 6: note = RNA
  misc_feature 7: note = DNA
  misc_feature 8..11: note = RNA
  misc_feature 12: note = DNA
  misc_feature 13..23: note = RNA
tcgcgagaggacaagggaagacc

SEQ ID NO: 1031 - RNA, 23 nt, synthetic construct
  source 1..23: mol_type = other RNA
  modified_base 1: mod_base = OTHER; note = Vinyl-phosphonate 2'-O-methyluridine-3'-phosphorothioate
  modified_base 2: mod_base = OTHER; note = 2'-fluorouridine -3'-phosphorothioate
  modified_base 3: mod_base = OTHER; note = 2'-O-methylcytidine-3'-phosphate
  modified_base 4: mod_base = OTHER; note = 2'-O-methylguanosine-3'-phosphate
  modified_base 5: mod_base = OTHER; note = 2'-O-methylcytidine-3'-phosphate
  modified_base 6: mod_base = OTHER; note = 2'-fluoroguanosine-3'-phosphate
  modified_base 7: mod_base = OTHER; note = 2'-O-methyladenosine-3'-phosphate
  modified_base 8: mod_base = OTHER; note = 2'-fluoroguanosine-3'-phosphate
  modified_base 9: mod_base = OTHER; note = 2'-fluoroadenosine-3'-phosphate
  modified_base 10: mod_base = OTHER; note = 2'-O-methylguanosine-3'-phosphate
  modified_base 11: mod_base = OTHER; note = 2'-O-methylguanosine-3'-phosphate
  modified_base 12: mod_base = OTHER; note = 2'-O-methyladenosine-3'-phosphate
  modified_base 13: mod_base = OTHER; note = 2'-O-methylcytidine-3'-phosphate
  modified_base 14: mod_base = OTHER; note = 2'-fluoroadenosine-3'-phosphate
  modified_base 15: mod_base = OTHER; note = 2'-O-methyladenosine-3'-phosphate
  modified_base 16: mod_base = OTHER; note = 2'-fluoroguanosine-3'-phosphate
  modified_base 17: mod_base = OTHER; note = 2'-O-methylguanosine-3'-phosphate
  modified_base 18: mod_base = OTHER; note = 2'-O-methylguanosine-3'-phosphate
  modified_base 19: mod_base = OTHER; note = 2'-O-methyladenosine-3'-phosphate
  modified_base 20: mod_base = OTHER; note = 2'-O-methyladenosine-3'-phosphate
  modified_base 21: mod_base = OTHER; note = 2'-O-methylguanosine-3'- phosphorothioate
  modified_base 22: mod_base = OTHER; note = 2'-O-methyladenosine-3'- phosphorothioate
  modified_base 23: mod_base = OTHER; note = 2'-O-methylcytidine-3'-phosphate
ttcgcgagaggacaagggaagac

SEQ ID NO: 1032 - DNA, 23 bp, synthetic construct
  source 1..23: mol_type = other DNA
  modified_base 1: mod_base = OTHER; note = Vinyl-phosphonate 2'-O-methyluridine-3'-phosphorothioate
  modified_base 2: mod_base = OTHER; note = 2'-deoxythymidine-3'-phosphorothioate
  modified_base 3: mod_base = OTHER; note = 2'-O-methylcytidine-3'-phosphate
  modified_base 4: mod_base = OTHER; note = 2'-O-methylguanosine-3'-phosphate
  modified_base 6: mod_base = OTHER; note = 2'-O-methylguanosine-3'-phosphate
  modified_base 8: mod_base = OTHER; note = 2'-O-methylguanosine-3'-phosphate
  modified_base 9: mod_base = OTHER; note = 2'-O-methyladenosine-3'-phosphate
  modified_base 10: mod_base = OTHER; note = 2'-O-methylguanosine-3'-phosphate
  modified_base 11: mod_base = OTHER; note = 2'-O-methylguanosine-3'-phosphate
  modified_base 13: mod_base = OTHER; note = 2'-O-methylcytidine-3'-phosphate
  modified_base 14: mod_base = OTHER; note = 2'-fluoroadenosine-3'-phosphate
  modified_base 15: mod_base = OTHER; note = 2'-O-methyladenosine-3'-phosphate
  modified_base 16: mod_base = OTHER; note = 2'-O-methylguanosine-3'-phosphate
  modified_base 17: mod_base = OTHER; note = 2'-O-methylguanosine-3'-phosphate
  modified_base 18: mod_base = OTHER; note = 2'-O-methylguanosine-3'-phosphate
  modified_base 19: mod_base = OTHER; note = 2'-O-methyladenosine-3'-phosphate
  modified_base 20: mod_base = OTHER; note = 2'-O-methyladenosine-3'-phosphate
  modified_base 21: mod_base = OTHER; note = 2'-O-methylguanosine-3'- phosphorothioate
  modified_base 22: mod_base = OTHER; note = 2'-O-methyladenosine-3'- phosphorothioate
  modified_base 23: mod_base = OTHER; note = 2'-O-methylcytidine-3'-phosphate
  misc_feature 1: note = RNA
  misc_feature 2: note = DNA
  misc_feature 3..4: note = RNA
  misc_feature 5: note = DNA
  misc_feature 6: note = RNA
  misc_feature 7: note = DNA
  misc_feature 8..11: note = RNA
  misc_feature 12: note = DNA
  misc_feature 13..23: note = RNA
ttcgcgagaggacaagggaagac

SEQ ID NO: 1033 - RNA, 23 nt, synthetic construct
  source 1..23: mol_type = other RNA
  modified_base 1: mod_base = OTHER; note = Vinyl-phosphonate 2'-O-methyluridine-3'-phosphorothioate
  modified_base 2: mod_base = OTHER; note = 2'-fluorocytidine-3'-phosphorothioate
  modified_base 3: mod_base = OTHER; note = 2'-O-methyluridine-3'-phosphate
  modified_base 4: mod_base = OTHER; note = 2'-O-methylcytidine-3'-phosphate
  modified_base 5: mod_base = OTHER; note = 2'-O-methylguanosine-3'-phosphate
  modified_base 6: mod_base = OTHER; note = 2'-fluorocytidine-3'-phosphate
  modified_base 7: mod_base = OTHER; note = 2'-O-methylguanosine-3'-phosphate
  modified_base 8: mod_base = OTHER; note = 2'-fluoroadenosine-3'-phosphate
  modified_base 9: mod_base = OTHER; note = 2'-fluoroguanosine-3'-phosphate
  modified_base 10: mod_base = OTHER; note = 2'-O-methyladenosine-3'-phosphate
  modified_base 11: mod_base = OTHER; note = 2'-O-methylguanosine-3'-phosphate
  modified_base 12: mod_base = OTHER; note = 2'-O-methylguanosine-3'-phosphate
  modified_base 13: mod_base = OTHER; note = 2'-O-methyladenosine-3'-phosphate
  modified_base 14: mod_base = OTHER; note = 2'-fluorocytidine-3'-phosphate
  modified_base 15: mod_base = OTHER; note = 2'-O-methyladenosine-3'-phosphate
  modified_base 16: mod_base = OTHER; note = 2'-fluoroadenosine-3'-phosphate
  modified_base 17: mod_base = OTHER; note = 2'-O-methylguanosine-3'-phosphate
  modified_base 18: mod_base = OTHER; note = 2'-O-methylguanosine-3'-phosphate
  modified_base 19: mod_base = OTHER; note = 2'-O-methylguanosine-3'-phosphate
  modified_base 20: mod_base = OTHER; note = 2'-O-methyladenosine-3'-phosphate
  modified_base 21: mod_base = OTHER; note = 2'-O-methyladenosine-3'- phosphorothioate
  modified_base 22: mod_base = OTHER; note = 2'-O-methylguanosine-3'- phosphorothioate
  modified_base 23: mod_base = OTHER; note = 2'-O-methyladenosine-3'-phosphate
tctcgcgagaggacaagggaaga

SEQ ID NO: 1034 - DNA, 23 bp, synthetic construct
  source 1..23: mol_type = other DNA
  modified_base 1: mod_base = OTHER; note = Vinyl-phosphonate 2'-O-methyluridine-3'-phosphorothioate
  modified_base 2: mod_base = OTHER; note = 2'-deoxycytidine-3'-phosphorothioate
  modified_base 3: mod_base = OTHER; note = 2'-O-methyluridine-3'-phosphate
  modified_base 4: mod_base = OTHER; note = 2'-O-methylcytidine-3'-phosphate
  modified_base 6: mod_base = OTHER; note = 2'-O-methylcytidine-3'-phosphate
  modified_base 8: mod_base = OTHER; note = 2'-O-methyladenosine-3'-phosphate
  modified_base 9: mod_base = OTHER; note = 2'-O-methylguanosine-3'-phosphate
  modified_base 10: mod_base = OTHER; note = 2'-O-methyladenosine-3'-phosphate
  modified_base 11: mod_base = OTHER; note = 2'-O-methylguanosine-3'-phosphate
  modified_base 13: mod_base = OTHER; note = 2'-O-methyladenosine-3'-phosphate
  modified_base 14: mod_base = OTHER; note = 2'-fluorocytidine-3'-phosphate
  modified_base 15: mod_base = OTHER; note = 2'-O-methyladenosine-3'-phosphate
  modified_base 16: mod_base = OTHER; note = 2'-O-methyladenosine-3'-phosphate
  modified_base 17: mod_base = OTHER; note = 2'-O-methylguanosine-3'-phosphate
  modified_base 18: mod_base = OTHER; note = 2'-O-methylguanosine-3'-phosphate
  modified_base 19: mod_base = OTHER; note = 2'-O-methylguanosine-3'-phosphate
  modified_base 20: mod_base = OTHER; note = 2'-O-methyladenosine-3'-phosphate
  modified_base 21: mod_base = OTHER; note = 2'-O-methyladenosine-3'- phosphorothioate
  modified_base 22: mod_base = OTHER; note = 2'-O-methylguanosine-3'- phosphorothioate
  modified_base 23: mod_base = OTHER; note = 2'-O-methyladenosine-3'-phosphate
  misc_feature 1: note = RNA
  misc_feature 2: note = DNA
  misc_feature 3..4: note = RNA
  misc_feature 5: note = DNA
  misc_feature 6: note = RNA
  misc_feature 7: note = DNA
  misc_feature 8..11: note = RNA
  misc_feature 12: note = DNA
  misc_feature 13..23: note = RNA
tctcgcgagaggacaagggaaga

SEQ ID NO: 1035 - RNA, 23 nt, synthetic construct
  source 1..23: mol_type = other RNA
  modified_base 1: mod_base = OTHER; note = Vinyl-phosphonate 2'-O-methyluridine-3'-phosphorothioate
  modified_base 2: mod_base = OTHER; note = 2'-fluorocytidine-3'-phosphorothioate
  modified_base 3: mod_base = OTHER; note = 2'-O-methylcytidine-3'-phosphate
  modified_base 4: mod_base = OTHER; note = 2'-O-methyluridine-3'-phosphate
  modified_base 5: mod_base = OTHER; note = 2'-O-methylcytidine-3'-phosphate
  modified_base 6: mod_base = OTHER; note = 2'-fluoroguanosine-3'-phosphate
  modified_base 7: mod_base = OTHER; note = 2'-O-methylcytidine-3'-phosphate
  modified_base 8: mod_base = OTHER; note = 2'-fluoroguanosine-3'-phosphate
  modified_base 9: mod_base = OTHER; note = 2'-fluoroadenosine-3'-phosphate
  modified_base 10: mod_base = OTHER; note = 2'-O-methylguanosine-3'-phosphate
  modified_base 11: mod_base = OTHER; note = 2'-O-methyladenosine-3'-phosphate
  modified_base 12: mod_base = OTHER; note = 2'-O-methylguanosine-3'-phosphate
  modified_base 13: mod_base = OTHER; note = 2'-O-methylguanosine-3'-phosphate
  modified_base 14: mod_base = OTHER; note = 2'-fluoroadenosine-3'-phosphate
  modified_base 15: mod_base = OTHER; note = 2'-O-methylcytidine-3'-phosphate
  modified_base 16: mod_base = OTHER; note = 2'-fluoroadenosine-3'-phosphate
  modified_base 17: mod_base = OTHER; note = 2'-O-methyladenosine-3'-phosphate
  modified_base 18: mod_base = OTHER; note = 2'-O-methylguanosine-3'-phosphate
  modified_base 19: mod_base = OTHER; note = 2'-O-methylguanosine-3'-phosphate
  modified_base 20: mod_base = OTHER; note = 2'-O-methylguanosine-3'-phosphate
  modified_base 21: mod_base = OTHER; note = 2'-O-methyladenosine-3'- phosphorothioate
  modified_base 22: mod_base = OTHER; note = 2'-O-methyladenosine-3'- phosphorothioate
  modified_base 23: mod_base = OTHER; note = 2'-O-methylguanosine-3'-phosphate
tcctcgcgagaggacaagggaag

SEQ ID NO: 1036 - DNA, 23 bp, synthetic construct
  source 1..23: mol_type = other DNA
  modified_base 1: mod_base = OTHER; note = Vinyl-phosphonate 2'-O-methyluridine-3'-phosphorothioate
  modified_base 2: mod_base = OTHER; note = 2'-deoxycytidine-3'-phosphorothioate
  modified_base 3: mod_base = OTHER; note = 2'-O-methylcytidine-3'-phosphate
  modified_base 4: mod_base = OTHER; note = 2'-O-methyluridine-3'-phosphate
  modified_base 6: mod_base = OTHER; note = 2'-O-methylguanosine-3'-phosphate
  modified_base 8: mod_base = OTHER; note = 2'-O-methylguanosine-3'-phosphate
  modified_base 9: mod_base = OTHER; note = 2'-O-methyladenosine-3'-phosphate
  modified_base 10: mod_base = OTHER; note = 2'-O-methylguanosine-3'-phosphate
  modified_base 11: mod_base = OTHER; note = 2'-O-methyladenosine-3'-phosphate
  modified_base 13: mod_base = OTHER; note = 2'-O-methylguanosine-3'-phosphate
  modified_base 14: mod_base = OTHER; note = 2'-fluoroadenosine-3'-phosphate
  modified_base 15: mod_base = OTHER; note = 2'-O-methylcytidine-3'-phosphate
  modified_base 16: mod_base = OTHER; note = 2'-O-methyladenosine-3'-phosphate
  modified_base 17: mod_base = OTHER; note = 2'-O-methyladenosine-3'-phosphate
  modified_base 18: mod_base = OTHER; note = 2'-O-methylguanosine-3'-phosphate
  modified_base 19: mod_base = OTHER; note = 2'-O-methylguanosine-3'-phosphate
  modified_base 20: mod_base = OTHER; note = 2'-O-methylguanosine-3'-phosphate
  modified_base 21: mod_base = OTHER; note = 2'-O-methyladenosine-3'- phosphorothioate
  modified_base 22: mod_base = OTHER; note = 2'-O-methyladenosine-3'- phosphorothioate
  modified_base 23: mod_base = OTHER; note = 2'-O-methylguanosine-3'-phosphate
  misc_feature 1: note = RNA
  misc_feature 2: note = DNA
  misc_feature 3..4: note = RNA
  misc_feature 5: note = DNA
  misc_feature 6: note = RNA
  misc_feature 7: note = DNA
  misc_feature 8..11: note = RNA
  misc_feature 12: note = DNA
  misc_feature 13..23: note = RNA
tcctcgcgagaggacaagggaag

SEQ ID NO: 1037 - RNA, 23 nt, synthetic construct
  source 1..23: mol_type = other RNA
  modified_base 1: mod_base = OTHER; note = Vinyl-phosphonate 2'-O-methyluridine-3'-phosphorothioate
  modified_base 2: mod_base = OTHER; note = 2'-fluorocytidine-3'-phosphorothioate
  modified_base 3: mod_base = OTHER; note = 2'-O-methylcytidine-3'-phosphate
  modified_base 4: mod_base = OTHER; note = 2'-O-methylcytidine-3'-phosphate
  modified_base 5: mod_base = OTHER; note = 2'-O-methyluridine-3'-phosphate
  modified_base 6: mod_base = OTHER; note = 2'-fluorocytidine-3'-phosphate
  modified_base 7: mod_base = OTHER; note = 2'-O-methylguanosine-3'-phosphate
  modified_base 8: mod_base = OTHER; note = 2'-fluorocytidine-3'-phosphate
  modified_base 9: mod_base = OTHER; note = 2'-fluoroguanosine-3'-phosphate
  modified_base 10: mod_base = OTHER; note = 2'-O-methyladenosine-3'-phosphate
  modified_base 11: mod_base = OTHER; note = 2'-O-methylguanosine-3'-phosphate
  modified_base 12: mod_base = OTHER; note = 2'-O-methyladenosine-3'-phosphate
  modified_base 13: mod_base = OTHER; note = 2'-O-methylguanosine-3'-phosphate
  modified_base 14: mod_base = OTHER; note = 2'-fluoroguanosine-3'-phosphate
  modified_base 15: mod_base = OTHER; note = 2'-O-methyladenosine-3'-phosphate
  modified_base 16: mod_base = OTHER; note = 2'-fluorocytidine-3'-phosphate
  modified_base 17: mod_base = OTHER; note = 2'-O-methyladenosine-3'-phosphate
  modified_base 18: mod_base = OTHER; note = 2'-O-methyladenosine-3'-phosphate
  modified_base 19: mod_base = OTHER; note = 2'-O-methylguanosine-3'-phosphate
  modified_base 20: mod_base = OTHER; note = 2'-O-methylguanosine-3'-phosphate
  modified_base 21: mod_base = OTHER; note = 2'-O-methylguanosine-3'- phosphorothioate
  modified_base 22: mod_base = OTHER; note = 2'-O-methyladenosine-3'- phosphorothioate
  modified_base 23: mod_base = OTHER; note = 2'-O-methyladenosine-3'-phosphate
tccctcgcgagaggacaagggaa

SEQ ID NO: 1038 - DNA, 23 bp, synthetic construct
  source 1..23: mol_type = other DNA
  modified_base 1: mod_base = OTHER; note = Vinyl-phosphonate 2'-O-methyluridine-3'-phosphorothioate
  modified_base 2: mod_base = OTHER; note = 2'-deoxycytidine-3'-phosphorothioate
  modified_base 3: mod_base = OTHER; note = 2'-O-methylcytidine-3'-phosphate
  modified_base 4: mod_base = OTHER; note = 2'-O-methylcytidine-3'-phosphate
  modified_base 6: mod_base = OTHER; note = 2'-O-methylcytidine-3'-phosphate
  modified_base 8: mod_base = OTHER; note = 2'-O-methylcytidine-3'-phosphate
  modified_base 9: mod_base = OTHER; note = 2'-O-methylguanosine-3'-phosphate
  modified_base 10: mod_base = OTHER; note = 2'-O-methyladenosine-3'-phosphate
  modified_base 11: mod_base = OTHER; note = 2'-O-methylguanosine-3'-phosphate
  modified_base 13: mod_base = OTHER; note = 2'-O-methylguanosine-3'-phosphate
  modified_base 14: mod_base = OTHER; note = 2'-fluoroguanosine-3'-phosphate
  modified_base 15: mod_base = OTHER; note = 2'-O-methyladenosine-3'-phosphate
  modified_base 16: mod_base = OTHER; note = 2'-O-methylcytidine-3'-phosphate
  modified_base 17: mod_base = OTHER; note = 2'-O-methyladenosine-3'-phosphate
  modified_base 18: mod_base = OTHER; note = 2'-O-methyladenosine-3'-phosphate
  modified_base 19: mod_base = OTHER; note = 2'-O-methylguanosine-3'-phosphate
  modified_base 20: mod_base = OTHER; note = 2'-O-methylguanosine-3'-phosphate
  modified_base 21: mod_base = OTHER; note = 2'-O-methylguanosine-3'- phosphorothioate
  modified_base 22: mod_base = OTHER; note = 2'-O-methyladenosine-3'- phosphorothioate
  modified_base 23: mod_base = OTHER; note = 2'-O-methyladenosine-3'-phosphate
  misc_feature 1: note = RNA
  misc_feature 2: note = DNA
  misc_feature 3..4: note = RNA
  misc_feature 5: note = DNA
  misc_feature 6: note = RNA
  misc_feature 7: note = DNA
  misc_feature 8..11: note = RNA
  misc_feature 12: note = DNA
  misc_feature 13..23: note = RNA
tccctcgcgagaggacaagggaa

SEQ ID NO: 1039 - RNA, 23 nt, synthetic construct
  source 1..23: mol_type = other RNA
  modified_base 1: mod_base = OTHER; note = Vinyl-phosphonate 2'-O-methyluridine-3'-phosphorothioate
  modified_base 2: mod_base = OTHER; note = 2'-fluorocytidine-3'-phosphorothioate
  modified_base 3: mod_base = OTHER; note = 2'-O-methyluridine-3'-phosphate
  modified_base 4: mod_base = OTHER; note = 2'-O-methylcytidine-3'-phosphate
  modified_base 5: mod_base = OTHER; note = 2'-O-methylguanosine-3'-phosphate
  modified_base 6: mod_base = OTHER; note = 2'-fluoroguanosine-3'-phosphate
  modified_base 7: mod_base = OTHER; note = 2'-O-methyluridine-3'-phosphate
  modified_base 8: mod_base = OTHER; note = 2'-fluoroguanosine-3'-phosphate
  modified_base 9: mod_base = OTHER; note = 2'-fluoroadenosine-3'-phosphate
  modified_base 10: mod_base = OTHER; note = 2'-O-methyladenosine-3'-phosphate
  modified_base 11: mod_base = OTHER; note = 2'-O-methyluridine-3'-phosphate
  modified_base 12: mod_base = OTHER; note = 2'-O-methyluridine-3'-phosphate
  modified_base 13: mod_base = OTHER; note = 2'-O-methylcytidine-3'-phosphate
  modified_base 14: mod_base = OTHER; note = 2'-fluoroadenosine-3'-phosphate
  modified_base 15: mod_base = OTHER; note = 2'-O-methylguanosine-3'-phosphate
  modified_base 16: mod_base = OTHER; note = 2'-fluoroguanosine-3'-phosphate
  modified_base 17: mod_base = OTHER; note = 2'-O-methyladenosine-3'-phosphate
  modified_base 18: mod_base = OTHER; note = 2'-O-methylcytidine-3'-phosphate
  modified_base 19: mod_base = OTHER; note = 2'-O-methyladenosine-3'-phosphate
  modified_base 20: mod_base = OTHER; note = 2'-O-methylguanosine-3'-phosphate
  modified_base 21: mod_base = OTHER; note = 2'-O-methylguanosine-3'- phosphorothioate
  modified_base 22: mod_base = OTHER; note = 2'-O-methylcytidine-3'- phosphorothioate
  modified_base 23: mod_base = OTHER; note = 2'-O-methylcytidine-3'-phosphate
tctcggtgaattcaggacaggcc

SEQ ID NO: 1040 - DNA, 23 bp, synthetic construct
  source 1..23: mol_type = other DNA
  modified_base 1: mod_base = OTHER; note = Vinyl-phosphonate 2'-O-methyluridine-3'-phosphorothioate
  modified_base 2: mod_base = OTHER; note = 2'-deoxycytidine-3'-phosphorothioate
  modified_base 3: mod_base = OTHER; note = 2'-O-methyluridine-3'-phosphate
  modified_base 4: mod_base = OTHER; note = 2'-O-methylcytidine-3'-phosphate
  modified_base 6: mod_base = OTHER; note = 2'-O-methylguanosine-3'-phosphate
  modified_base 8: mod_base = OTHER; note = 2'-O-methylguanosine-3'-phosphate
  modified_base 9: mod_base = OTHER; note = 2'-O-methyladenosine-3'-phosphate
  modified_base 10: mod_base = OTHER; note = 2'-O-methyladenosine-3'-phosphate
  modified_base 11: mod_base = OTHER; note = 2'-O-methyluridine-3'-phosphate
  modified_base 13: mod_base = OTHER; note = 2'-O-methylcytidine-3'-phosphate
  modified_base 14: mod_base = OTHER; note = 2'-fluoroadenosine-3'-phosphate
  modified_base 15: mod_base = OTHER; note = 2'-O-methylguanosine-3'-phosphate
  modified_base 16: mod_base = OTHER; note = 2'-O-methylguanosine-3'-phosphate
  modified_base 17: mod_base = OTHER; note = 2'-O-methyladenosine-3'-phosphate
  modified_base 18: mod_base = OTHER; note = 2'-O-methylcytidine-3'-phosphate
  modified_base 19: mod_base = OTHER; note = 2'-O-methyladenosine-3'-phosphate
  modified_base 20: mod_base = OTHER; note = 2'-O-methylguanosine-3'-phosphate
  modified_base 21: mod_base = OTHER; note = 2'-O-methylguanosine-3'- phosphorothioate
  modified_base 22: mod_base = OTHER; note = 2'-O-methylcytidine-3'- phosphorothioate
  modified_base 23: mod_base = OTHER; note = 2'-O-methylcytidine-3'-phosphate
  misc_feature 1: note = RNA
  misc_feature 2: note = DNA
  misc_feature 3..4: note = RNA
  misc_feature 5: note = DNA
  misc_feature 6: note = RNA
  misc_feature 7: note = DNA
  misc_feature 8..11: note = RNA
  misc_feature 12: note = DNA
  misc_feature 13..23: note = RNA
tctcggtgaattcaggacaggcc

SEQ ID NO: 1041 - RNA, 23 nt, synthetic construct
  source 1..23: mol_type = other RNA
  modified_base 1: mod_base = OTHER; note = Vinyl-phosphonate 2'-O-methyluridine-3'-phosphorothioate
  modified_base 2: mod_base = OTHER; note = 2'-fluorocytidine-3'-phosphorothioate
  modified_base 3: mod_base = OTHER; note = 2'-O-methylcytidine-3'-phosphate
  modified_base 4: mod_base = OTHER; note = 2'-O-methyluridine-3'-phosphate
  modified_base 5: mod_base = OTHER; note = 2'-O-methylcytidine-3'-phosphate
  modified_base 6: mod_base = OTHER; note = 2'-fluoroguanosine-3'-phosphate
  modified_base 7: mod_base = OTHER; note = 2'-O-methylguanosine-3'-phosphate
  modified_base 8: mod_base = OTHER; note = 2'-fluorouridine-3'-phosphate
  modified_base 9: mod_base = OTHER; note = 2'-fluoroguanosine-3'-phosphate
  modified_base 10: mod_base = OTHER; note = 2'-O-methyladenosine-3'-phosphate
  modified_base 11: mod_base = OTHER; note = 2'-O-methyladenosine-3'-phosphate
  modified_base 12: mod_base = OTHER; note = 2'-O-methyluridine-3'-phosphate
  modified_base 13: mod_base = OTHER; note = 2'-O-methyluridine-3'-phosphate
  modified_base 14: mod_base = OTHER; note = 2'-fluorocytidine-3'-phosphate
  modified_base 15: mod_base = OTHER; note = 2'-O-methyladenosine-3'-phosphate
  modified_base 16: mod_base = OTHER; note = 2'-fluoroguanosine-3'-phosphate
  modified_base 17: mod_base = OTHER; note = 2'-O-methylguanosine-3'-phosphate
  modified_base 18: mod_base = OTHER; note = 2'-O-methyladenosine-3'-phosphate
  modified_base 19: mod_base = OTHER; note = 2'-O-methylcytidine-3'-phosphate
  modified_base 20: mod_base = OTHER; note = 2'-O-methyladenosine-3'-phosphate
  modified_base 21: mod_base = OTHER; note = 2'-O-methylguanosine-3'- phosphorothioate
  modified_base 22: mod_base = OTHER; note = 2'-O-methylguanosine-3'- phosphorothioate
  modified_base 23: mod_base = OTHER; note = 2'-O-methylcytidine-3'-phosphate
tcctcggtgaattcaggacaggc

SEQ ID NO: 1042 - DNA, 23 bp, synthetic construct
  source 1..23: mol_type = other DNA
  modified_base 1: mod_base = OTHER; note = Vinyl-phosphonate 2'-O-methyluridine-3'-phosphorothioate
  modified_base 2: mod_base = OTHER; note = 2'-deoxycytidine-3'-phosphorothioate
  modified_base 3: mod_base = OTHER; note = 2'-O-methylcytidine-3'-phosphate
  modified_base 4: mod_base = OTHER; note = 2'-O-methyluridine-3'-phosphate
  modified_base 6: mod_base = OTHER; note = 2'-O-methylguanosine-3'-phosphate
  modified_base 8: mod_base = OTHER; note = 2'-O-methyluridine-3'-phosphate
  modified_base 9: mod_base = OTHER; note = 2'-O-methylguanosine-3'-phosphate
  modified_base 10: mod_base = OTHER; note = 2'-O-methyladenosine-3'-phosphate
  modified_base 11: mod_base = OTHER; note = 2'-O-methyladenosine-3'-phosphate
  modified_base 13: mod_base = OTHER; note = 2'-O-methyluridine-3'-phosphate
  modified_base 14: mod_base = OTHER; note = 2'-fluorocytidine-3'-phosphate
  modified_base 15: mod_base = OTHER; note = 2'-O-methyladenosine-3'-phosphate
  modified_base 16: mod_base = OTHER; note = 2'-O-methylguanosine-3'-phosphate
  modified_base 17: mod_base = OTHER; note = 2'-O-methylguanosine-3'-phosphate
  modified_base 18: mod_base = OTHER; note = 2'-O-methyladenosine-3'-phosphate
  modified_base 19: mod_base = OTHER; note = 2'-O-methylcytidine-3'-phosphate
  modified_base 20: mod_base = OTHER; note = 2'-O-methyladenosine-3'-phosphate
  modified_base 21: mod_base = OTHER; note = 2'-O-methylguanosine-3'- phosphorothioate
  modified_base 22: mod_base = OTHER; note = 2'-O-methylguanosine-3'- phosphorothioate
  modified_base 23: mod_base = OTHER; note = 2'-O-methylcytidine-3'-phosphate
  misc_feature 1: note = RNA
  misc_feature 2: note = DNA
  misc_feature 3..4: note = RNA
  misc_feature 5: note = DNA
  misc_feature 6: note = RNA
  misc_feature 7: note = DNA
  misc_feature 8..11: note = RNA
  misc_feature 12: note = DNA
  misc_feature 13..23: note = RNA
tcctcggtgaattcaggacaggc

SEQ ID NO: 1043 - RNA, 23 nt, synthetic construct
  source 1..23: mol_type = other RNA
  modified_base 1: mod_base = OTHER; note = Vinyl-phosphonate 2'-O-methyluridine-3'-phosphorothioate
  modified_base 2: mod_base = OTHER; note = 2'-fluorocytidine-3'-phosphorothioate
  modified_base 3: mod_base = OTHER; note = 2'-O-methylcytidine-3'-phosphate
  modified_base 4: mod_base = OTHER; note = 2'-O-methylcytidine-3'-phosphate
  modified_base 5: mod_base = OTHER; note = 2'-O-methyluridine-3'-phosphate
  modified_base 6: mod_base = OTHER; note = 2'-fluorocytidine-3'-phosphate
  modified_base 7: mod_base = OTHER; note = 2'-O-methylguanosine-3'-phosphate
  modified_base 8: mod_base = OTHER; note = 2'-fluoroguanosine-3'-phosphate
  modified_base 9: mod_base = OTHER; note = 2'-fluorouridine-3'-phosphate
  modified_base 10: mod_base = OTHER; note = 2'-O-methylguanosine-3'-phosphate
  modified_base 11: mod_base = OTHER; note = 2'-O-methyladenosine-3'-phosphate
  modified_base 12: mod_base = OTHER; note = 2'-O-methyladenosine-3'-phosphate
  modified_base 13: mod_base = OTHER; note = 2'-O-methyluridine-3'-phosphate
  modified_base 14: mod_base = OTHER; note = 2'-fluorouridine-3'-phosphate
  modified_base 15: mod_base = OTHER; note = 2'-O-methylcytidine-3'-phosphate
  modified_base 16: mod_base = OTHER; note = 2'-fluoroadenosine-3'-phosphate
  modified_base 17: mod_base = OTHER; note = 2'-O-methylguanosine-3'-phosphate
  modified_base 18: mod_base = OTHER; note = 2'-O-methylguanosine-3'-phosphate
  modified_base 19: mod_base = OTHER; note = 2'-O-methyladenosine-3'-phosphate
  modified_base 20: mod_base = OTHER; note = 2'-O-methylcytidine-3'-phosphate
  modified_base 21: mod_base = OTHER; note = 2'-O-methyladenosine-3'- phosphorothioate
  modified_base 22: mod_base = OTHER; note = 2'-O-methylguanosine-3'- phosphorothioate
  modified_base 23: mod_base = OTHER; note = 2'-O-methylguanosine-3'-phosphate
tccctcggtgaattcaggacagg

SEQ ID NO: 1044 - DNA, 23 bp, synthetic construct
  source 1..23: mol_type = other DNA
  modified_base 1: mod_base = OTHER; note = Vinyl-phosphonate 2'-O-methyluridine-3'-phosphorothioate
  modified_base 2: mod_base = OTHER; note = 2'-deoxycytidine-3'-phosphorothioate
  modified_base 3: mod_base = OTHER; note = 2'-O-methylcytidine-3'-phosphate
  modified_base 4: mod_base = OTHER; note = 2'-O-methylcytidine-3'-phosphate
  modified_base 6: mod_base = OTHER; note = 2'-O-methylcytidine-3'-phosphate
  modified_base 8: mod_base = OTHER; note = 2'-O-methylguanosine-3'-phosphate
  modified_base 9: mod_base = OTHER; note = 2'-O-methyluridine-3'-phosphate
  modified_base 10: mod_base = OTHER; note = 2'-O-methylguanosine-3'-phosphate
  modified_base 11: mod_base = OTHER; note = 2'-O-methyladenosine-3'-phosphate
  modified_base 13: mod_base = OTHER; note = 2'-O-methyluridine-3'-phosphate
  modified_base 14: mod_base = OTHER; note = 2'-fluorouridine-3'-phosphate
  modified_base 15: mod_base = OTHER; note = 2'-O-methylcytidine-3'-phosphate
  modified_base 16: mod_base = OTHER; note = 2'-O-methyladenosine-3'-phosphate
  modified_base 17: mod_base = OTHER; note = 2'-O-methylguanosine-3'-phosphate
  modified_base 18: mod_base = OTHER; note = 2'-O-methylguanosine-3'-phosphate
  modified_base 19: mod_base = OTHER; note = 2'-O-methyladenosine-3'-phosphate
  modified_base 20: mod_base = OTHER; note = 2'-O-methylcytidine-3'-phosphate
  modified_base 21: mod_base = OTHER; note = 2'-O-methyladenosine-3'- phosphorothioate
  modified_base 22: mod_base = OTHER; note = 2'-O-methylguanosine-3'- phosphorothioate
  modified_base 23: mod_base = OTHER; note = 2'-O-methylguanosine-3'-phosphate
  misc_feature 1: note = RNA
  misc_feature 2: note = DNA
  misc_feature 3..4: note = RNA
  misc_feature 5: note = DNA
  misc_feature 6: note = RNA
  misc_feature 7: note = DNA
  misc_feature 8..11: note = RNA
  misc_feature 12: note = DNA
  misc_feature 13..23: note = RNA
tccctcggtgaattcaggacagg

SEQ ID NO: 1045 - DNA, 23 bp, synthetic construct
  source 1..23: mol_type = other DNA
  modified_base 1: mod_base = OTHER; note = Vinyl-phosphonate 2'-O-methyluridine-3'-phosphorothioate
  modified_base 2: mod_base = OTHER; note = 2'-fluorouridine -3'-phosphorothioate
  modified_base 3: mod_base = OTHER; note = 2'-O-methylcytidine-3'-phosphate
  modified_base 4: mod_base = OTHER; note = 2'-O-methylguanosine-3'-phosphate
  modified_base 6: mod_base = OTHER; note = 2'-O-methyladenosine-3'-phosphate
  modified_base 7: mod_base = OTHER; note = Thymidine-glycol nucleic acid (GNA) S-Isomer
  modified_base 8: mod_base = OTHER; note = 2'-O-methylcytidine-3'-phosphate
  modified_base 9: mod_base = OTHER; note = 2'-O-methylcytidine-3'-phosphate
  modified_base 10: mod_base = OTHER; note = 2'-O-methyluridine-3'-phosphate
  modified_base 11: mod_base = OTHER; note = 2'-O-methylguanosine-3'-phosphate
  modified_base 12: mod_base = OTHER; note = 2'-O-methylcytidine-3'-phosphate
  modified_base 13: mod_base = OTHER; note = 2'-O-methylguanosine-3'-phosphate
  modified_base 14: mod_base = OTHER; note = 2'-fluoroadenosine-3'-phosphate
  modified_base 15: mod_base = OTHER; note = 2'-O-methyladenosine-3'-phosphate
  modified_base 16: mod_base = OTHER; note = 2'-fluoroguanosine-3'-phosphate
  modified_base 17: mod_base = OTHER; note = 2'-O-methylguanosine-3'-phosphate
  modified_base 18: mod_base = OTHER; note = 2'-O-methylguanosine-3'-phosphate
  modified_base 19: mod_base = OTHER; note = 2'-O-methylcytidine-3'-phosphate
  modified_base 20: mod_base = OTHER; note = 2'-O-methylguanosine-3'-phosphate
  modified_base 21: mod_base = OTHER; note = 2'-O-methyladenosine-3'- phosphorothioate
  modified_base 22: mod_base = OTHER; note = 2'-O-methylguanosine-3'- phosphorothioate
  modified_base 23: mod_base = OTHER; note = 2'-O-methyladenosine-3'-phosphate
  misc_feature 1..4: note = RNA
  misc_feature 5: note = DNA
  misc_feature 6: note = RNA
  misc_feature 7: note = DNA
  misc_feature 8..23: note = RNA
ttcgcatcctgcgaagggcgaga

SEQ ID NO: 1046 - DNA, 23 bp, synthetic construct
  source 1..23: mol_type = other DNA
  modified_base 1: mod_base = OTHER; note = Vinyl-phosphonate 2'-O-methyluridine-3'-phosphorothioate
  modified_base 2: mod_base = OTHER; note = 2'-fluorouridine -3'-phosphorothioate
  modified_base 3: mod_base = OTHER; note = 2'-O-methyluridine-3'-phosphate
  modified_base 4: mod_base = OTHER; note = 2'-O-methylcytidine-3'-phosphate
  modified_base 6: mod_base = OTHER; note = 2'-O-methylcytidine-3'-phosphate
  modified_base 7: mod_base = OTHER; note = Adenosine-glycol nucleic acid (GNA) S-Isomer
  modified_base 8: mod_base = OTHER; note = 2'-O-methyluridine-3'-phosphate
  modified_base 9: mod_base = OTHER; note = 2'-O-methylcytidine-3'-phosphate
  modified_base 10: mod_base = OTHER; note = 2'-O-methylcytidine-3'-phosphate
  modified_base 11: mod_base = OTHER; note = 2'-O-methyluridine-3'-phosphate
  modified_base 12: mod_base = OTHER; note = 2'-O-methylguanosine-3'-phosphate
  modified_base 13: mod_base = OTHER; note = 2'-O-methylcytidine-3'-phosphate
  modified_base 14: mod_base = OTHER; note = 2'-fluoroguanosine-3'-phosphate
  modified_base 15: mod_base = OTHER; note = 2'-O-methyladenosine-3'-phosphate
  modified_base 16: mod_base = OTHER; note = 2'-fluoroadenosine-3'-phosphate
  modified_base 17: mod_base = OTHER; note = 2'-O-methylguanosine-3'-phosphate
  modified_base 18: mod_base = OTHER; note = 2'-O-methylguanosine-3'-phosphate
  modified_base 19: mod_base = OTHER; note = 2'-O-methylguanosine-3'-phosphate
  modified_base 20: mod_base = OTHER; note = 2'-O-methylcytidine-3'-phosphate
  modified_base 21: mod_base = OTHER; note = 2'-O-methylguanosine-3'- phosphorothioate
  modified_base 22: mod_base = OTHER; note = 2'-O-methyladenosine-3'- phosphorothioate
  modified_base 23: mod_base = OTHER; note = 2'-O-methylguanosine-3'-phosphate
  misc_feature 1..4: note = RNA
  misc_feature 5: note = DNA
  misc_feature 6..23: note = RNA
tttcgcatcctgcgaagggcgag

SEQ ID NO: 1047 - RNA, 23 nt, synthetic construct
  source 1..23: mol_type = other RNA
  modified_base 1: mod_base = OTHER; note = Vinyl-phosphonate 2'-O-methyluridine-3'-phosphorothioate
  modified_base 2: mod_base = OTHER; note = 2'-fluorocytidine-3'-phosphorothioate
  modified_base 3: mod_base = OTHER; note = 2'-O-methyluridine-3'-phosphate
  modified_base 4: mod_base = OTHER; note = 2'-O-methyluridine-3'-phosphate
  modified_base 5: mod_base = OTHER; note = 2'-O-methylcytidine-3'-phosphate
  modified_base 6: mod_base = OTHER; note = 2'-fluoroguanosine-3'-phosphate
  modified_base 7: mod_base = OTHER; note = 2'-O-methylcytidine-3'-phosphate
  modified_base 8: mod_base = OTHER; note = 2'-fluoroadenosine-3'-phosphate
  modified_base 9: mod_base = OTHER; note = 2'-fluorouridine-3'-phosphate
  modified_base 10: mod_base = OTHER; note = 2'-O-methylcytidine-3'-phosphate
  modified_base 11: mod_base = OTHER; note = 2'-O-methylcytidine-3'-phosphate
  modified_base 12: mod_base = OTHER; note = 2'-O-methyluridine-3'-phosphate
  modified_base 13: mod_base = OTHER; note = 2'-O-methylguanosine-3'-phosphate
  modified_base 14: mod_base = OTHER; note = 2'-fluorocytidine-3'-phosphate
  modified_base 15: mod_base = OTHER; note = 2'-O-methylguanosine-3'-phosphate
  modified_base 16: mod_base = OTHER; note = 2'-fluoroadenosine-3'-phosphate
  modified_base 17: mod_base = OTHER; note = 2'-O-methyladenosine-3'-phosphate
  modified_base 18: mod_base = OTHER; note = 2'-O-methylguanosine-3'-phosphate
  modified_base 19: mod_base = OTHER; note = 2'-O-methylguanosine-3'-phosphate
  modified_base 20: mod_base = OTHER; note = 2'-O-methylguanosine-3'-phosphate
  modified_base 21: mod_base = OTHER; note = 2'-O-methylcytidine-3'- phosphorothioate
  modified_base 22: mod_base = OTHER; note = 2'-O-methylguanosine-3'- phosphorothioate
  modified_base 23: mod_base = OTHER; note = 2'-O-methyladenosine-3'-phosphate
tcttcgcatcctgcgaagggcga

SEQ ID NO: 1048 - DNA, 23 bp, synthetic construct
  source 1..23: mol_type = other DNA
  modified_base 1: mod_base = OTHER; note = Vinyl-phosphonate 2'-O-methyluridine-3'-phosphorothioate
  modified_base 2: mod_base = OTHER; note = 2'-deoxycytidine-3'-phosphorothioate
  modified_base 3: mod_base = OTHER; note = 2'-O-methyluridine-3'-phosphate
  modified_base 4: mod_base = OTHER; note = 2'-O-methyluridine-3'-phosphate
  modified_base 6: mod_base = OTHER; note = 2'-O-methylguanosine-3'-phosphate
  modified_base 8: mod_base = OTHER; note = 2'-O-methyladenosine-3'-phosphate
  modified_base 9: mod_base = OTHER; note = 2'-O-methyluridine-3'-phosphate
  modified_base 10: mod_base = OTHER; note = 2'-O-methylcytidine-3'-phosphate
  modified_base 11: mod_base = OTHER; note = 2'-O-methylcytidine-3'-phosphate
  modified_base 13: mod_base = OTHER; note = 2'-O-methylguanosine-3'-phosphate
  modified_base 14: mod_base = OTHER; note = 2'-fluorocytidine-3'-phosphate
  modified_base 15: mod_base = OTHER; note = 2'-O-methylguanosine-3'-phosphate
  modified_base 16: mod_base = OTHER; note = 2'-O-methyladenosine-3'-phosphate
  modified_base 17: mod_base = OTHER; note = 2'-O-methyladenosine-3'-phosphate
  modified_base 18: mod_base = OTHER; note = 2'-O-methylguanosine-3'-phosphate
  modified_base 19: mod_base = OTHER; note = 2'-O-methylguanosine-3'-phosphate
  modified_base 20: mod_base = OTHER; note = 2'-O-methylguanosine-3'-phosphate
  modified_base 21: mod_base = OTHER; note = 2'-O-methylcytidine-3'- phosphorothioate
  modified_base 22: mod_base = OTHER; note = 2'-O-methylguanosine-3'- phosphorothioate
  modified_base 23: mod_base = OTHER; note = 2'-O-methyladenosine-3'-phosphate
  misc_feature 1: note = RNA
  misc_feature 2: note = DNA
  misc_feature 3..4: note = RNA
  misc_feature 5: note = DNA
  misc_feature 6: note = RNA
  misc_feature 7: note = DNA
  misc_feature 8..11: note = RNA
  misc_feature 12: note = DNA
  misc_feature 13..23: note = RNA
tcttcgcatcctgcgaagggcga

SEQ ID NO: 1049 - RNA, 23 nt, synthetic construct
  source 1..23: mol_type = other RNA
  modified_base 1: mod_base = OTHER; note = Vinyl-phosphonate 2'-O-methyluridine-3'-phosphorothioate
  modified_base 2: mod_base = OTHER; note = 2'-fluorocytidine-3'-phosphorothioate
  modified_base 3: mod_base = OTHER; note = 2'-O-methyluridine-3'-phosphate
  modified_base 4: mod_base = OTHER; note = 2'-O-methylcytidine-3'-phosphate
  modified_base 5: mod_base = OTHER; note = 2'-O-methyluridine-3'-phosphate
  modified_base 6: mod_base = OTHER; note = 2'-fluorouridine-3'-phosphate
  modified_base 7: mod_base = OTHER; note = 2'-O-methylcytidine-3'-phosphate
  modified_base 8: mod_base = OTHER; note = 2'-fluoroguanosine-3'-phosphate
  modified_base 9: mod_base = OTHER; note = 2'-fluorocytidine-3'-phosphate
  modified_base 10: mod_base = OTHER; note = 2'-O-methyladenosine-3'-phosphate
  modified_base 11: mod_base = OTHER; note = 2'-O-methyluridine-3'-phosphate
  modified_base 12: mod_base = OTHER; note = 2'-O-methylcytidine-3'-phosphate
  modified_base 13: mod_base = OTHER; note = 2'-O-methylcytidine-3'-phosphate
  modified_base 14: mod_base = OTHER; note = 2'-fluorouridine-3'-phosphate
  modified_base 15: mod_base = OTHER; note = 2'-O-methylguanosine-3'-phosphate
  modified_base 16: mod_base = OTHER; note = 2'-fluorocytidine-3'-phosphate
  modified_base 17: mod_base = OTHER; note = 2'-O-methylguanosine-3'-phosphate
  modified_base 18: mod_base = OTHER; note = 2'-O-methyladenosine-3'-phosphate
  modified_base 19: mod_base = OTHER; note = 2'-O-methyladenosine-3'-phosphate
  modified_base 20: mod_base = OTHER; note = 2'-O-methylguanosine-3'-phosphate
  modified_base 21: mod_base = OTHER; note = 2'-O-methylguanosine-3'- phosphorothioate
  modified_base 22: mod_base = OTHER; note = 2'-O-methylguanosine-3'- phosphorothioate
  modified_base 23: mod_base = OTHER; note = 2'-O-methylcytidine-3'-phosphate
tctcttcgcatcctgcgaagggc

SEQ ID NO: 1050 - DNA, 23 bp, synthetic construct
  source 1..23: mol_type = other DNA
  modified_base 1: mod_base = OTHER; note = Vinyl-phosphonate 2'-O-methyluridine-3'-phosphorothioate
  modified_base 2: mod_base = OTHER; note = 2'-deoxycytidine-3'-phosphorothioate
  modified_base 3: mod_base = OTHER; note = 2'-O-methyluridine-3'-phosphate
  modified_base 4: mod_base = OTHER; note = 2'-O-methylcytidine-3'-phosphate
  modified_base 6: mod_base = OTHER; note = 2'-O-methyluridine-3'-phosphate
  modified_base 8: mod_base = OTHER; note = 2'-O-methylguanosine-3'-phosphate
  modified_base 9: mod_base = OTHER; note = 2'-O-methylcytidine-3'-phosphate
  modified_base 10: mod_base = OTHER; note = 2'-O-methyladenosine-3'-phosphate
  modified_base 11: mod_base = OTHER; note = 2'-O-methyluridine-3'-phosphate
  modified_base 13: mod_base = OTHER; note = 2'-O-methylcytidine-3'-phosphate
  modified_base 14: mod_base = OTHER; note = 2'-fluorouridine-3'-phosphate
  modified_base 15: mod_base = OTHER; note = 2'-O-methylguanosine-3'-phosphate
  modified_base 16: mod_base = OTHER; note = 2'-O-methylcytidine-3'-phosphate
  modified_base 17: mod_base = OTHER; note = 2'-O-methylguanosine-3'-phosphate
  modified_base 18: mod_base = OTHER; note = 2'-O-methyladenosine-3'-phosphate
  modified_base 19: mod_base = OTHER; note = 2'-O-methyladenosine-3'-phosphate
  modified_base 20: mod_base = OTHER; note = 2'-O-methylguanosine-3'-phosphate
  modified_base 21: mod_base = OTHER; note = 2'-O-methylguanosine-3'- phosphorothioate
  modified_base 22: mod_base = OTHER; note = 2'-O-methylguanosine-3'- phosphorothioate
  modified_base 23: mod_base = OTHER; note = 2'-O-methylcytidine-3'-phosphate
  misc_feature 1: note = RNA
  misc_feature 2: note = DNA
  misc_feature 3..4: note = RNA
  misc_feature 5: note = DNA
  misc_feature 6: note = RNA
  misc_feature 7: note = DNA
  misc_feature 8..11: note = RNA
  misc_feature 12: note = DNA
  misc_feature 13..23: note = RNA
tctcttcgcatcctgcgaagggc

SEQ ID NO: 1051 - DNA, 23 bp, synthetic construct
  source 1..23: mol_type = other DNA
  modified_base 1: mod_base = OTHER; note = Vinyl-phosphonate 2'-O-methyluridine-3'-phosphorothioate
  modified_base 2: mod_base = OTHER; note = 2'-fluoroadenosine-3'-phosphorothioate
  modified_base 3: mod_base = OTHER; note = 2'-O-methylcytidine-3'-phosphate
  modified_base 4: mod_base = OTHER; note = 2'-O-methyluridine-3'-phosphate
  modified_base 6: mod_base = OTHER; note = 2'-O-methyluridine-3'-phosphate
  modified_base 7: mod_base = OTHER; note = Thymidine-glycol nucleic acid (GNA) S-Isomer
  modified_base 8: mod_base = OTHER; note = 2'-O-methylcytidine-3'-phosphate
  modified_base 9: mod_base = OTHER; note = 2'-O-methylguanosine-3'-phosphate
  modified_base 10: mod_base = OTHER; note = 2'-O-methylcytidine-3'-phosphate
  modified_base 11: mod_base = OTHER; note = 2'-O-methyladenosine-3'-phosphate
  modified_base 12: mod_base = OTHER; note = 2'-O-methyluridine-3'-phosphate
  modified_base 13: mod_base = OTHER; note = 2'-O-methylcytidine-3'-phosphate
  modified_base 14: mod_base = OTHER; note = 2'-fluorocytidine-3'-phosphate
  modified_base 15: mod_base = OTHER; note = 2'-O-methyluridine-3'-phosphate
  modified_base 16: mod_base = OTHER; note = 2'-fluoroguanosine-3'-phosphate
  modified_base 17: mod_base = OTHER; note = 2'-O-methylcytidine-3'-phosphate
  modified_base 18: mod_base = OTHER; note = 2'-O-methylguanosine-3'-phosphate
  modified_base 19: mod_base = OTHER; note = 2'-O-methyladenosine-3'-phosphate
  modified_base 20: mod_base = OTHER; note = 2'-O-methyladenosine-3'-phosphate
  modified_base 21: mod_base = OTHER; note = 2'-O-methylguanosine-3'- phosphorothioate
  modified_base 22: mod_base = OTHER; note = 2'-O-methylguanosine-3'- phosphorothioate
  modified_base 23: mod_base = OTHER; note = 2'-O-methylguanosine-3'-phosphate
  misc_feature 1..4: note = RNA
  misc_feature 5: note = DNA
  misc_feature 6: note = RNA
  misc_feature 7: note = DNA
  misc_feature 8..23: note = RNA
tactcttcgcatcctgcgaaggg

SEQ ID NO: 1052 - DNA, 23 bp, synthetic construct
  source 1..23: mol_type = other DNA
  modified_base 1: mod_base = OTHER; note = Vinyl-phosphonate 2'-O-methyluridine-3'-phosphorothioate
  modified_base 2: mod_base = OTHER; note = 2'-fluoroadenosine-3'-phosphorothioate
  modified_base 3: mod_base = OTHER; note = 2'-O-methyladenosine-3'-phosphate
  modified_base 4: mod_base = OTHER; note = 2'-O-methylcytidine-3'-phosphate
  modified_base 6: mod_base = OTHER; note = 2'-O-methylcytidine-3'-phosphate
  modified_base 7: mod_base = OTHER; note = Thymidine-glycol nucleic acid (GNA) S-Isomer
  modified_base 8: mod_base = OTHER; note = 2'-O-methyluridine-3'-phosphate
  modified_base 9: mod_base = OTHER; note = 2'-O-methylcytidine-3'-phosphate
  modified_base 10: mod_base = OTHER; note = 2'-O-methylguanosine-3'-phosphate
  modified_base 11: mod_base = OTHER; note = 2'-O-methylcytidine-3'-phosphate
  modified_base 12: mod_base = OTHER; note = 2'-O-methyladenosine-3'-phosphate
  modified_base 13: mod_base = OTHER; note = 2'-O-methyluridine-3'-phosphate
  modified_base 14: mod_base = OTHER; note = 2'-fluorocytidine-3'-phosphate
  modified_base 15: mod_base = OTHER; note = 2'-O-methylcytidine-3'-phosphate
  modified_base 16: mod_base = OTHER; note = 2'-fluorouridine-3'-phosphate
  modified_base 17: mod_base = OTHER; note = 2'-O-methylguanosine-3'-phosphate
  modified_base 18: mod_base = OTHER; note = 2'-O-methylcytidine-3'-phosphate
  modified_base 19: mod_base = OTHER; note = 2'-O-methylguanosine-3'-phosphate
  modified_base 20: mod_base = OTHER; note = 2'-O-methyladenosine-3'-phosphate
  modified_base 21: mod_base = OTHER; note = 2'-O-methyladenosine-3'- phosphorothioate
  modified_base 22: mod_base = OTHER; note = 2'-O-methylguanosine-3'- phosphorothioate
  modified_base 23: mod_base = OTHER; note = 2'-O-methylguanosine-3'-phosphate
  misc_feature 1..4: note = RNA
  misc_feature 5: note = DNA
  misc_feature 6: note = RNA
  misc_feature 7: note = DNA
  misc_feature 8..23: note = RNA
taactcttcgcatcctgcgaagg

SEQ ID NO: 1053 - RNA, 23 nt, synthetic construct
  source 1..23: mol_type = other RNA
  modified_base 1: mod_base = OTHER; note = Vinyl-phosphonate 2'-O-methyluridine-3'-phosphorothioate
  modified_base 2: mod_base = OTHER; note = 2'-fluorocytidine-3'-phosphorothioate
  modified_base 3: mod_base = OTHER; note = 2'-O-methyladenosine-3'-phosphate
  modified_base 4: mod_base = OTHER; note = 2'-O-methyladenosine-3'-phosphate
  modified_base 5: mod_base = OTHER; note = 2'-O-methylcytidine-3'-phosphate
  modified_base 6: mod_base = OTHER; note = 2'-fluorouridine-3'-phosphate
  modified_base 7: mod_base = OTHER; note = 2'-O-methylcytidine-3'-phosphate
  modified_base 8: mod_base = OTHER; note = 2'-fluorouridine-3'-phosphate
  modified_base 9: mod_base = OTHER; note = 2'-fluorouridine-3'-phosphate
  modified_base 10: mod_base = OTHER; note = 2'-O-methylcytidine-3'-phosphate
  modified_base 11: mod_base = OTHER; note = 2'-O-methylguanosine-3'-phosphate
  modified_base 12: mod_base = OTHER; note = 2'-O-methylcytidine-3'-phosphate
  modified_base 13: mod_base = OTHER; note = 2'-O-methyladenosine-3'-phosphate
  modified_base 14: mod_base = OTHER; note = 2'-fluorouridine-3'-phosphate
  modified_base 15: mod_base = OTHER; note = 2'-O-methylcytidine-3'-phosphate
  modified_base 16: mod_base = OTHER; note = 2'-fluorocytidine-3'-phosphate
  modified_base 17: mod_base = OTHER; note = 2'-O-methyluridine-3'-phosphate
  modified_base 18: mod_base = OTHER; note = 2'-O-methylguanosine-3'-phosphate
  modified_base 19: mod_base = OTHER; note = 2'-O-methylcytidine-3'-phosphate
  modified_base 20: mod_base = OTHER; note = 2'-O-methylguanosine-3'-phosphate
  modified_base 21: mod_base = OTHER; note = 2'-O-methyladenosine-3'- phosphorothioate
  modified_base 22: mod_base = OTHER; note = 2'-O-methyladenosine-3'- phosphorothioate
  modified_base 23: mod_base = OTHER; note = 2'-O-methylguanosine-3'-phosphate
tcaactcttcgcatcctgcgaag

SEQ ID NO: 1054 - DNA, 23 bp, synthetic construct
  source 1..23: mol_type = other DNA
  modified_base 1: mod_base = OTHER; note = Vinyl-phosphonate 2'-O-methyluridine-3'-phosphorothioate
  modified_base 2: mod_base = OTHER; note = 2'-deoxycytidine-3'-phosphorothioate
  modified_base 3: mod_base = OTHER; note = 2'-O-methyladenosine-3'-phosphate
  modified_base 4: mod_base = OTHER; note = 2'-O-methyladenosine-3'-phosphate
  modified_base 6: mod_base = OTHER; note = 2'-O-methyluridine-3'-phosphate
  modified_base 8: mod_base = OTHER; note = 2'-O-methyluridine-3'-phosphate
  modified_base 9: mod_base = OTHER; note = 2'-O-methyluridine-3'-phosphate
  modified_base 10: mod_base = OTHER; note = 2'-O-methylcytidine-3'-phosphate
  modified_base 11: mod_base = OTHER; note = 2'-O-methylguanosine-3'-phosphate
  modified_base 13: mod_base = OTHER; note = 2'-O-methyladenosine-3'-phosphate
  modified_base 14: mod_base = OTHER; note = 2'-fluorouridine-3'-phosphate
  modified_base 15: mod_base = OTHER; note = 2'-O-methylcytidine-3'-phosphate
  modified_base 16: mod_base = OTHER; note = 2'-O-methylcytidine-3'-phosphate
  modified_base 17: mod_base = OTHER; note = 2'-O-methyluridine-3'-phosphate
  modified_base 18: mod_base = OTHER; note = 2'-O-methylguanosine-3'-phosphate
  modified_base 19: mod_base = OTHER; note = 2'-O-methylcytidine-3'-phosphate
  modified_base 20: mod_base = OTHER; note = 2'-O-methylguanosine-3'-phosphate
  modified_base 21: mod_base = OTHER; note = 2'-O-methyladenosine-3'- phosphorothioate
  modified_base 22: mod_base = OTHER; note = 2'-O-methyladenosine-3'- phosphorothioate
  modified_base 23: mod_base = OTHER; note = 2'-O-methylguanosine-3'-phosphate
  misc_feature 1: note = RNA
  misc_feature 2: note = DNA
  misc_feature 3..4: note = RNA
  misc_feature 5: note = DNA
  misc_feature 6: note = RNA
  misc_feature 7: note = DNA
  misc_feature 8..11: note = RNA
  misc_feature 12: note = DNA
  misc_feature 13..23: note = RNA
tcaactcttcgcatcctgcgaag

SEQ ID NO: 1055 - RNA, 23 nt, synthetic construct
  source 1..23: mol_type = other RNA
  modified_base 1: mod_base = OTHER; note = Vinyl-phosphonate 2'-O-methyluridine-3'-phosphorothioate
  modified_base 2: mod_base = OTHER; note = 2'-fluorocytidine-3'-phosphorothioate
  modified_base 3: mod_base = OTHER; note = 2'-O-methylcytidine-3'-phosphate
  modified_base 4: mod_base = OTHER; note = 2'-O-methyladenosine-3'-phosphate
  modified_base 5: mod_base = OTHER; note = 2'-O-methyladenosine-3'-phosphate
  modified_base 6: mod_base = OTHER; note = 2'-fluorocytidine-3'-phosphate
  modified_base 7: mod_base = OTHER; note = 2'-O-methyluridine-3'-phosphate
  modified_base 8: mod_base = OTHER; note = 2'-fluorocytidine-3'-phosphate
  modified_base 9: mod_base = OTHER; note = 2'-fluorouridine-3'-phosphate
  modified_base 10: mod_base = OTHER; note = 2'-O-methyluridine-3'-phosphate
  modified_base 11: mod_base = OTHER; note = 2'-O-methylcytidine-3'-phosphate
  modified_base 12: mod_base = OTHER; note = 2'-O-methylguanosine-3'-phosphate
  modified_base 13: mod_base = OTHER; note = 2'-O-methylcytidine-3'-phosphate
  modified_base 14: mod_base = OTHER; note = 2'-fluoroadenosine-3'-phosphate
  modified_base 15: mod_base = OTHER; note = 2'-O-methyluridine-3'-phosphate
  modified_base 16: mod_base = OTHER; note = 2'-fluorocytidine-3'-phosphate
  modified_base 17: mod_base = OTHER; note = 2'-O-methylcytidine-3'-phosphate
  modified_base 18: mod_base = OTHER; note = 2'-O-methyluridine-3'-phosphate
  modified_base 19: mod_base = OTHER; note = 2'-O-methylguanosine-3'-phosphate
  modified_base 20: mod_base = OTHER; note = 2'-O-methylcytidine-3'-phosphate
  modified_base 21: mod_base = OTHER; note = 2'-O-methylguanosine-3'- phosphorothioate
  modified_base 22: mod_base = OTHER; note = 2'-O-methyladenosine-3'- phosphorothioate
  modified_base 23: mod_base = OTHER; note = 2'-O-methyladenosine-3'-phosphate
tccaactcttcgcatcctgcgaa

SEQ ID NO: 1056 - DNA, 23 bp, synthetic construct
  source 1..23: mol_type = other DNA
  modified_base 1: mod_base = OTHER; note = Vinyl-phosphonate 2'-O-methyluridine-3'-phosphorothioate
  modified_base 2: mod_base = OTHER; note = 2'-deoxycytidine-3'-phosphorothioate
  modified_base 3: mod_base = OTHER; note = 2'-O-methylcytidine-3'-phosphate
  modified_base 4: mod_base = OTHER; note = 2'-O-methyladenosine-3'-phosphate
  modified_base 6: mod_base = OTHER; note = 2'-O-methylcytidine-3'-phosphate
  modified_base 8: mod_base = OTHER; note = 2'-O-methylcytidine-3'-phosphate
  modified_base 9: mod_base = OTHER; note = 2'-O-methyluridine-3'-phosphate
  modified_base 10: mod_base = OTHER; note = 2'-O-methyluridine-3'-phosphate
  modified_base 11: mod_base = OTHER; note = 2'-O-methylcytidine-3'-phosphate
  modified_base 13: mod_base = OTHER; note = 2'-O-methylcytidine-3'-phosphate
  modified_base 14: mod_base = OTHER; note = 2'-fluoroadenosine-3'-phosphate
  modified_base 15: mod_base = OTHER; note = 2'-O-methyluridine-3'-phosphate
  modified_base 16: mod_base = OTHER; note = 2'-O-methylcytidine-3'-phosphate
  modified_base 17: mod_base = OTHER; note = 2'-O-methylcytidine-3'-phosphate
  modified_base 18: mod_base = OTHER; note = 2'-O-methyluridine-3'-phosphate
  modified_base 19: mod_base = OTHER; note = 2'-O-methylguanosine-3'-phosphate
  modified_base 20: mod_base = OTHER; note = 2'-O-methylcytidine-3'-phosphate
  modified_base 21: mod_base = OTHER; note = 2'-O-methylguanosine-3'- phosphorothioate
  modified_base 22: mod_base = OTHER; note = 2'-O-methyladenosine-3'- phosphorothioate
  modified_base 23: mod_base = OTHER; note = 2'-O-methyladenosine-3'-phosphate
  misc_feature 1: note = RNA
  misc_feature 2: note = DNA
  misc_feature 3..4: note = RNA
  misc_feature 5: note = DNA
  misc_feature 6: note = RNA
  misc_feature 7: note = DNA
  misc_feature 8..11: note = RNA
  misc_feature 12: note = DNA
  misc_feature 13..23: note = RNA
tccaactcttcgcatcctgcgaa

SEQ ID NO: 1057 - RNA, 23 nt, synthetic construct
  source 1..23: mol_type = other RNA
  modified_base 1: mod_base = OTHER; note = Vinyl-phosphonate 2'-O-methyluridine-3'-phosphorothioate
  modified_base 2: mod_base = OTHER; note = 2'-fluorocytidine-3'-phosphorothioate
  modified_base 3: mod_base = OTHER; note = 2'-O-methylcytidine-3'-phosphate
  modified_base 4: mod_base = OTHER; note = 2'-O-methylcytidine-3'-phosphate
  modified_base 5: mod_base = OTHER; note = 2'-O-methyladenosine-3'-phosphate
  modified_base 6: mod_base = OTHER; note = 2'-fluoroadenosine-3'-phosphate
  modified_base 7: mod_base = OTHER; note = 2'-O-methylcytidine-3'-phosphate
  modified_base 8: mod_base = OTHER; note = 2'-fluorouridine-3'-phosphate
  modified_base 9: mod_base = OTHER; note = 2'-fluorocytidine-3'-phosphate
  modified_base 10: mod_base = OTHER; note = 2'-O-methyluridine-3'-phosphate
  modified_base 11: mod_base = OTHER; note = 2'-O-methyluridine-3'-phosphate
  modified_base 12: mod_base = OTHER; note = 2'-O-methylcytidine-3'-phosphate
  modified_base 13: mod_base = OTHER; note = 2'-O-methylguanosine-3'-phosphate
  modified_base 14: mod_base = OTHER; note = 2'-fluorocytidine-3'-phosphate
  modified_base 15: mod_base = OTHER; note = 2'-O-methyladenosine-3'-phosphate
  modified_base 16: mod_base = OTHER; note = 2'-fluorouridine-3'-phosphate
  modified_base 17: mod_base = OTHER; note = 2'-O-methylcytidine-3'-phosphate
  modified_base 18: mod_base = OTHER; note = 2'-O-methylcytidine-3'-phosphate
  modified_base 19: mod_base = OTHER; note = 2'-O-methyluridine-3'-phosphate
  modified_base 20: mod_base = OTHER; note = 2'-O-methylguanosine-3'-phosphate
  modified_base 21: mod_base = OTHER; note = 2'-O-methylcytidine-3'- phosphorothioate
  modified_base 22: mod_base = OTHER; note = 2'-O-methylguanosine-3'- phosphorothioate
  modified_base 23: mod_base = OTHER; note = 2'-O-methyladenosine-3'-phosphate
tcccaactcttcgcatcctgcga

SEQ ID NO: 1058 - DNA, 23 bp, synthetic construct
  source 1..23: mol_type = other DNA
  modified_base 1: mod_base = OTHER; note = Vinyl-phosphonate 2'-O-methyluridine-3'-phosphorothioate
  modified_base 2: mod_base = OTHER; note = 2'-deoxycytidine-3'-phosphorothioate
  modified_base 3: mod_base = OTHER; note = 2'-O-methylcytidine-3'-phosphate
  modified_base 4: mod_base = OTHER; note = 2'-O-methylcytidine-3'-phosphate
  modified_base 6: mod_base = OTHER; note = 2'-O-methyladenosine-3'-phosphate
  modified_base 8: mod_base = OTHER; note = 2'-O-methyluridine-3'-phosphate
  modified_base 9: mod_base = OTHER; note = 2'-O-methylcytidine-3'-phosphate
  modified_base 10: mod_base = OTHER; note = 2'-O-methyluridine-3'-phosphate
  modified_base 11: mod_base = OTHER; note = 2'-O-methyluridine-3'-phosphate
  modified_base 13: mod_base = OTHER; note = 2'-O-methylguanosine-3'-phosphate
  modified_base 14: mod_base = OTHER; note = 2'-fluorocytidine-3'-phosphate
  modified_base 15: mod_base = OTHER; note = 2'-O-methyladenosine-3'-phosphate
  modified_base 16: mod_base = OTHER; note = 2'-O-methyluridine-3'-phosphate
  modified_base 17: mod_base = OTHER; note = 2'-O-methylcytidine-3'-phosphate
  modified_base 18: mod_base = OTHER; note = 2'-O-methylcytidine-3'-phosphate
  modified_base 19: mod_base = OTHER; note = 2'-O-methyluridine-3'-phosphate
  modified_base 20: mod_base = OTHER; note = 2'-O-methylguanosine-3'-phosphate
  modified_base 21: mod_base = OTHER; note = 2'-O-methylcytidine-3'- phosphorothioate
  modified_base 22: mod_base = OTHER; note = 2'-O-methylguanosine-3'- phosphorothioate
  modified_base 23: mod_base = OTHER; note = 2'-O-methyladenosine-3'-phosphate
  misc_feature 1: note = RNA
  misc_feature 2: note = DNA
  misc_feature 3..4: note = RNA
  misc_feature 5: note = DNA
  misc_feature 6: note = RNA
  misc_feature 7: note = DNA
  misc_feature 8..11: note = RNA
  misc_feature 12: note = DNA
  misc_feature 13..23: note = RNA
tcccaactcttcgcatcctgcga

SEQ ID NO: 1059 - DNA, 23 bp, synthetic construct
  source 1..23: mol_type = other DNA
  modified_base 1: mod_base = OTHER; note = Vinyl-phosphonate 2'-O-methyluridine-3'-phosphorothioate
  modified_base 2: mod_base = OTHER; note = 2'-fluorocytidine-3'-phosphorothioate
  modified_base 3: mod_base = OTHER; note = 2'-O-methylguanosine-3'-phosphate
  modified_base 4: mod_base = OTHER; note = 2'-O-methylcytidine-3'-phosphate
  modified_base 6: mod_base = OTHER; note = 2'-O-methylcytidine-3'-phosphate
  modified_base 7: mod_base = OTHER; note = Thymidine-glycol nucleic acid (GNA) S-Isomer
  modified_base 8: mod_base = OTHER; note = 2'-O-methylguanosine-3'-phosphate
  modified_base 9: mod_base = OTHER; note = 2'-O-methylguanosine-3'-phosphate
  modified_base 10: mod_base = OTHER; note = 2'-O-methyluridine-3'-phosphate
  modified_base 11: mod_base = OTHER; note = 2'-O-methyluridine-3'-phosphate
  modified_base 12: mod_base = OTHER; note = 2'-O-methyluridine-3'-phosphate
  modified_base 13: mod_base = OTHER; note = 2'-O-methylcytidine-3'-phosphate
  modified_base 14: mod_base = OTHER; note = 2'-fluorouridine-3'-phosphate
  modified_base 15: mod_base = OTHER; note = 2'-O-methylcytidine-3'-phosphate
  modified_base 16: mod_base = OTHER; note = 2'-fluoroguanosine-3'-phosphate
  modified_base 17: mod_base = OTHER; note = 2'-O-methylcytidine-3'-phosphate
  modified_base 18: mod_base = OTHER; note = 2'-O-methyladenosine-3'-phosphate
  modified_base 19: mod_base = OTHER; note = 2'-O-methyladenosine-3'-phosphate
  modified_base 20: mod_base = OTHER; note = 2'-O-methyladenosine-3'-phosphate
  modified_base 21: mod_base = OTHER; note = 2'-O-methyluridine-3'-phosphorothioate
  modified_base 22: mod_base = OTHER; note = 2'-O-methyladenosine-3'- phosphorothioate
  modified_base 23: mod_base = OTHER; note = 2'-O-methyladenosine-3'-phosphate
  misc_feature 1..4: note = RNA
  misc_feature 5: note = DNA
  misc_feature 6: note = RNA
  misc_feature 7: note = DNA
  misc_feature 8..23: note = RNA
tcgccctggtttctcgcaaataa

SEQ ID NO: 1060 - RNA, 23 nt, synthetic construct
  source 1..23: mol_type = other RNA
  modified_base 1: mod_base = OTHER; note = Vinyl-phosphonate 2'-O-methyluridine-3'-phosphorothioate
  modified_base 2: mod_base = OTHER; note = 2'-fluorocytidine-3'-phosphorothioate
  modified_base 3: mod_base = OTHER; note = 2'-O-methylguanosine-3'-phosphate
  modified_base 4: mod_base = OTHER; note = 2'-O-methylcytidine-3'-phosphate
  modified_base 5: mod_base = OTHER; note = 2'-O-methylcytidine-3'-phosphate
  modified_base 6: mod_base = OTHER; note = 2'-fluorocytidine-3'-phosphate
  modified_base 7: mod_base = OTHER; note = 2'-O-methyluridine-3'-phosphate
  modified_base 8: mod_base = OTHER; note = 2'-fluoroguanosine-3'-phosphate
  modified_base 9: mod_base = OTHER; note = 2'-fluoroguanosine-3'-phosphate
  modified_base 10: mod_base = OTHER; note = 2'-O-methyluridine-3'-phosphate
  modified_base 11: mod_base = OTHER; note = 2'-O-methyluridine-3'-phosphate
  modified_base 12: mod_base = OTHER; note = 2'-O-methyluridine-3'-phosphate
  modified_base 13: mod_base = OTHER; note = 2'-O-methylcytidine-3'-phosphate
  modified_base 14: mod_base = OTHER; note = 2'-fluorouridine-3'-phosphate
  modified_base 15: mod_base = OTHER; note = 2'-O-methylcytidine-3'-phosphate
  modified_base 16: mod_base = OTHER; note = 2'-fluoroguanosine-3'-phosphate
  modified_base 17: mod_base = OTHER; note = 2'-O-methylcytidine-3'-phosphate
  modified_base 18: mod_base = OTHER; note = 2'-O-methyladenosine-3'-phosphate
  modified_base 19: mod_base = OTHER; note = 2'-O-methyladenosine-3'-phosphate
  modified_base 20: mod_base = OTHER; note = 2'-O-methyladenosine-3'-phosphate
  modified_base 21: mod_base = OTHER; note = 2'-O-methyluridine-3'-phosphorothioate
  modified_base 22: mod_base = OTHER; note = 2'-O-methyladenosine-3'- phosphorothioate
  modified_base 23: mod_base = OTHER; note = 2'-O-methyladenosine-3'-phosphate
tcgccctggtttctcgcaaataa

SEQ ID NO: 1061 - DNA, 23 bp, synthetic construct
  source 1..23: mol_type = other DNA
  modified_base 1: mod_base = OTHER; note = Vinyl-phosphonate 2'-O-methyluridine-3'-phosphorothioate
  modified_base 2: mod_base = OTHER; note = 2'-deoxycytidine-3'-phosphorothioate
  modified_base 3: mod_base = OTHER; note = 2'-O-methylguanosine-3'-phosphate
  modified_base 4: mod_base = OTHER; note = 2'-O-methylcytidine-3'-phosphate
  modified_base 6: mod_base = OTHER; note = 2'-O-methylcytidine-3'-phosphate
  modified_base 8: mod_base = OTHER; note = 2'-O-methylguanosine-3'-phosphate
  modified_base 9: mod_base = OTHER; note = 2'-O-methylguanosine-3'-phosphate
  modified_base 10: mod_base = OTHER; note = 2'-O-methyluridine-3'-phosphate
  modified_base 11: mod_base = OTHER; note = 2'-O-methyluridine-3'-phosphate
  modified_base 13: mod_base = OTHER; note = 2'-O-methylcytidine-3'-phosphate
  modified_base 14: mod_base = OTHER; note = 2'-fluorouridine-3'-phosphate
  modified_base 15: mod_base = OTHER; note = 2'-O-methylcytidine-3'-phosphate
  modified_base 16: mod_base = OTHER; note = 2'-O-methylguanosine-3'-phosphate
  modified_base 17: mod_base = OTHER; note = 2'-O-methylcytidine-3'-phosphate
  modified_base 18: mod_base = OTHER; note = 2'-O-methyladenosine-3'-phosphate
  modified_base 19: mod_base = OTHER; note = 2'-O-methyladenosine-3'-phosphate
  modified_base 20: mod_base = OTHER; note = 2'-O-methyladenosine-3'-phosphate
  modified_base 21: mod_base = OTHER; note = 2'-O-methyluridine-3'-phosphorothioate
  modified_base 22: mod_base = OTHER; note = 2'-O-methyladenosine-3'- phosphorothioate
  modified_base 23: mod_base = OTHER; note = 2'-O-methyladenosine-3'-phosphate
  misc_feature 1: note = RNA
  misc_feature 2: note = DNA
  misc_feature 3..4: note = RNA
  misc_feature 5: note = DNA
  misc_feature 6: note = RNA
  misc_feature 7: note = DNA
  misc_feature 8..11: note = RNA
  misc_feature 12: note = DNA
  misc_feature 13..23: note = RNA
tcgccctggtttctcgcaaataa

SEQ ID NO: 1062 - RNA, 23 nt, synthetic construct
  source 1..23: mol_type = other RNA
  modified_base 1: mod_base = OTHER; note = Vinyl-phosphonate 2'-O-methyluridine-3'-phosphorothioate
  modified_base 2: mod_base = OTHER; note = 2'-fluorocytidine-3'-phosphorothioate
  modified_base 3: mod_base = OTHER; note = 2'-O-methylcytidine-3'-phosphate
  modified_base 4: mod_base = OTHER; note = 2'-O-methylguanosine-3'-phosphate
  modified_base 5: mod_base = OTHER; note = 2'-O-methylcytidine-3'-phosphate
  modified_base 6: mod_base = OTHER; note = 2'-fluorocytidine-3'-phosphate
  modified_base 7: mod_base = OTHER; note = 2'-O-methylcytidine-3'-phosphate
  modified_base 8: mod_base = OTHER; note = 2'-fluorouridine-3'-phosphate
  modified_base 9: mod_base = OTHER; note = 2'-fluoroguanosine-3'-phosphate
  modified_base 10: mod_base = OTHER; note = 2'-O-methylguanosine-3'-phosphate
  modified_base 11: mod_base = OTHER; note = 2'-O-methyluridine-3'-phosphate
  modified_base 12: mod_base = OTHER; note = 2'-O-methyluridine-3'-phosphate
  modified_base 13: mod_base = OTHER; note = 2'-O-methyluridine-3'-phosphate
  modified_base 14: mod_base = OTHER; note = 2'-fluorocytidine-3'-phosphate
  modified_base 15: mod_base = OTHER; note = 2'-O-methyluridine-3'-phosphate
  modified_base 16: mod_base = OTHER; note = 2'-fluorocytidine-3'-phosphate
  modified_base 17: mod_base = OTHER; note = 2'-O-methylguanosine-3'-phosphate
  modified_base 18: mod_base = OTHER; note = 2'-O-methylcytidine-3'-phosphate
  modified_base 19: mod_base = OTHER; note = 2'-O-methyladenosine-3'-phosphate
  modified_base 20: mod_base = OTHER; note = 2'-O-methyladenosine-3'-phosphate
  modified_base 21: mod_base = OTHER; note = 2'-O-methyladenosine-3'- phosphorothioate
  modified_base 22: mod_base = OTHER; note = 2'-O-methyluridine-3'-phosphorothioate
  modified_base 23: mod_base = OTHER; note = 2'-O-methyladenosine-3'-phosphate
tccgccctggtttctcgcaaata

SEQ ID NO: 1063 - DNA, 23 bp, synthetic construct
  source 1..23: mol_type = other DNA
  modified_base 1: mod_base = OTHER; note = Vinyl-phosphonate 2'-O-methyluridine-3'-phosphorothioate
  modified_base 2: mod_base = OTHER; note = 2'-deoxycytidine-3'-phosphorothioate
  modified_base 3: mod_base = OTHER; note = 2'-O-methylcytidine-3'-phosphate
  modified_base 4: mod_base = OTHER; note = 2'-O-methylguanosine-3'-phosphate
  modified_base 6: mod_base = OTHER; note = 2'-O-methylcytidine-3'-phosphate
  modified_base 8: mod_base = OTHER; note = 2'-O-methyluridine-3'-phosphate
  modified_base 9: mod_base = OTHER; note = 2'-O-methylguanosine-3'-phosphate
  modified_base 10: mod_base = OTHER; note = 2'-O-methylguanosine-3'-phosphate
  modified_base 11: mod_base = OTHER; note = 2'-O-methyluridine-3'-phosphate
  modified_base 13: mod_base = OTHER; note = 2'-O-methyluridine-3'-phosphate
  modified_base 14: mod_base = OTHER; note = 2'-fluorocytidine-3'-phosphate
  modified_base 15: mod_base = OTHER; note = 2'-O-methyluridine-3'-phosphate
  modified_base 16: mod_base = OTHER; note = 2'-O-methylcytidine-3'-phosphate
  modified_base 17: mod_base = OTHER; note = 2'-O-methylguanosine-3'-phosphate
  modified_base 18: mod_base = OTHER; note = 2'-O-methylcytidine-3'-phosphate
  modified_base 19: mod_base = OTHER; note = 2'-O-methyladenosine-3'-phosphate
  modified_base 20: mod_base = OTHER; note = 2'-O-methyladenosine-3'-phosphate
  modified_base 21: mod_base = OTHER; note = 2'-O-methyladenosine-3'- phosphorothioate
  modified_base 22: mod_base = OTHER; note = 2'-O-methyluridine-3'-phosphorothioate
  modified_base 23: mod_base = OTHER; note = 2'-O-methyladenosine-3'-phosphate
  misc_feature 1: note = RNA
  misc_feature 2: note = DNA
  misc_feature 3..4: note = RNA
  misc_feature 5: note = DNA
  misc_feature 6: note = RNA
  misc_feature 7: note = DNA
  misc_feature 8..11: note = RNA
  misc_feature 12: note = DNA
  misc_feature 13..23: note = RNA
tccgccctggtttctcgcaaata

SEQ ID NO: 1064 - RNA, 23 nt, synthetic construct
  source 1..23: mol_type = other RNA
  modified_base 1: mod_base = OTHER; note = Vinyl-phosphonate 2'-O-methyluridine-3'-phosphorothioate
  modified_base 2: mod_base = OTHER; note = 2'-fluorocytidine-3'-phosphorothioate
  modified_base 3: mod_base = OTHER; note = 2'-O-methylcytidine-3'-phosphate
  modified_base 4: mod_base = OTHER; note = 2'-O-methylcytidine-3'-phosphate
  modified_base 5: mod_base = OTHER; note = 2'-O-methylguanosine-3'-phosphate
  modified_base 6: mod_base = OTHER; note = 2'-fluorocytidine-3'-phosphate
  modified_base 7: mod_base = OTHER; note = 2'-O-methylcytidine-3'-phosphate
  modified_base 8: mod_base = OTHER; note = 2'-fluorocytidine-3'-phosphate
  modified_base 9: mod_base = OTHER; note = 2'-fluorouridine-3'-phosphate
  modified_base 10: mod_base = OTHER; note = 2'-O-methylguanosine-3'-phosphate
  modified_base 11: mod_base = OTHER; note = 2'-O-methylguanosine-3'-phosphate
  modified_base 12: mod_base = OTHER; note = 2'-O-methyluridine-3'-phosphate
  modified_base 13: mod_base = OTHER; note = 2'-O-methyluridine-3'-phosphate
  modified_base 14: mod_base = OTHER; note = 2'-fluorouridine-3'-phosphate
  modified_base 15: mod_base = OTHER; note = 2'-O-methylcytidine-3'-phosphate
  modified_base 16: mod_base = OTHER; note = 2'-fluorouridine-3'-phosphate
  modified_base 17: mod_base = OTHER; note = 2'-O-methylcytidine-3'-phosphate
  modified_base 18: mod_base = OTHER; note = 2'-O-methylguanosine-3'-phosphate
  modified_base 19: mod_base = OTHER; note = 2'-O-methylcytidine-3'-phosphate
  modified_base 20: mod_base = OTHER; note = 2'-O-methyladenosine-3'-phosphate
  modified_base 21: mod_base = OTHER; note = 2'-O-methyladenosine-3'- phosphorothioate
  modified_base 22: mod_base = OTHER; note = 2'-O-methyladenosine-3'- phosphorothioate
  modified_base 23: mod_base = OTHER; note = 2'-O-methyluridine-3'-phosphate
tcccgccctggtttctcgcaaat

SEQ ID NO: 1065 - DNA, 23 bp, synthetic construct
  source 1..23: mol_type = other DNA
  modified_base 1: mod_base = OTHER; note = Vinyl-phosphonate 2'-O-methyluridine-3'-phosphorothioate
  modified_base 2: mod_base = OTHER; note = 2'-deoxycytidine-3'-phosphorothioate
  modified_base 3: mod_base = OTHER; note = 2'-O-methylcytidine-3'-phosphate
  modified_base 4: mod_base = OTHER; note = 2'-O-methylcytidine-3'-phosphate
  modified_base 6: mod_base = OTHER; note = 2'-O-methylcytidine-3'-phosphate
  modified_base 8: mod_base = OTHER; note = 2'-O-methylcytidine-3'-phosphate
  modified_base 9: mod_base = OTHER; note = 2'-O-methyluridine-3'-phosphate
  modified_base 10: mod_base = OTHER; note = 2'-O-methylguanosine-3'-phosphate
  modified_base 11: mod_base = OTHER; note = 2'-O-methylguanosine-3'-phosphate
  modified_base 13: mod_base = OTHER; note = 2'-O-methyluridine-3'-phosphate
  modified_base 14: mod_base = OTHER; note = 2'-fluorouridine-3'-phosphate
  modified_base 15: mod_base = OTHER; note = 2'-O-methylcytidine-3'-phosphate
  modified_base 16: mod_base = OTHER; note = 2'-O-methyluridine-3'-phosphate
  modified_base 17: mod_base = OTHER; note = 2'-O-methylcytidine-3'-phosphate
  modified_base 18: mod_base = OTHER; note = 2'-O-methylguanosine-3'-phosphate
  modified_base 19: mod_base = OTHER; note = 2'-O-methylcytidine-3'-phosphate
  modified_base 20: mod_base = OTHER; note = 2'-O-methyladenosine-3'-phosphate
  modified_base 21: mod_base = OTHER; note = 2'-O-methyladenosine-3'- phosphorothioate
  modified_base 22: mod_base = OTHER; note = 2'-O-methyladenosine-3'- phosphorothioate
  modified_base 23: mod_base = OTHER; note = 2'-O-methyluridine-3'-phosphate
  misc_feature 1: note = RNA
  misc_feature 2: note = DNA
  misc_feature 3..4: note = RNA
  misc_feature 5: note = DNA
  misc_feature 6: note = RNA
  misc_feature 7: note = DNA
  misc_feature 8..11: note = RNA
  misc_feature 12: note = DNA
  misc_feature 13..23: note = RNA
tcccgccctggtttctcgcaaat

SEQ ID NO: 1066 - DNA, 23 bp, synthetic construct
  source 1..23: mol_type = other DNA
  modified_base 1: mod_base = OTHER; note = Vinyl-phosphonate 2'-O-methyluridine-3'-phosphorothioate
  modified_base 2: mod_base = OTHER; note = 2'-fluorouridine -3'-phosphorothioate
  modified_base 3: mod_base = OTHER; note = 2'-O-methyluridine-3'-phosphate
  modified_base 4: mod_base = OTHER; note = 2'-O-methylcytidine-3'-phosphate
  modified_base 6: mod_base = OTHER; note = 2'-O-methylcytidine-3'-phosphate
  modified_base 7: mod_base = OTHER; note = Thymidine-glycol nucleic acid (GNA) S-Isomer
  modified_base 8: mod_base = OTHER; note = 2'-O-methyluridine-3'-phosphate
  modified_base 9: mod_base = OTHER; note = 2'-O-methylcytidine-3'-phosphate
  modified_base 10: mod_base = OTHER; note = 2'-O-methyladenosine-3'-phosphate
  modified_base 11: mod_base = OTHER; note = 2'-O-methylcytidine-3'-phosphate
  modified_base 12: mod_base = OTHER; note = 2'-O-methyladenosine-3'-phosphate
  modified_base 13: mod_base = OTHER; note = 2'-O-methyladenosine-3'-phosphate
  modified_base 14: mod_base = OTHER; note = 2'-fluorocytidine-3'-phosphate
  modified_base 15: mod_base = OTHER; note = 2'-O-methylguanosine-3'-phosphate
  modified_base 16: mod_base = OTHER; note = 2'-fluorocytidine-3'-phosphate
  modified_base 17: mod_base = OTHER; note = 2'-O-methyladenosine-3'-phosphate
  modified_base 18: mod_base = OTHER; note = 2'-O-methylguanosine-3'-phosphate
  modified_base 19: mod_base = OTHER; note = 2'-O-methyluridine-3'-phosphate
  modified_base 20: mod_base = OTHER; note = 2'-O-methyluridine-3'-phosphate
  modified_base 21: mod_base = OTHER; note = 2'-O-methyladenosine-3'- phosphorothioate
  modified_base 22: mod_base = OTHER; note = 2'-O-methyladenosine-3'- phosphorothioate
  modified_base 23: mod_base = OTHER; note = 2'-O-methyladenosine-3'-phosphate
  misc_feature 1..4: note = RNA
  misc_feature 5: note = DNA
  misc_feature 6: note = RNA
  misc_feature 7: note = DNA
  misc_feature 8..23: note = RNA
tttctcttcacaacgcagttaaa

SEQ ID NO: 1067 - DNA, 23 bp, synthetic construct
  source 1..23: mol_type = other DNA
  modified_base 1: mod_base = OTHER; note = Vinyl-phosphonate 2'-O-methyluridine-3'-phosphorothioate
  modified_base 2: mod_base = OTHER; note = 2'-fluoroadenosine-3'-phosphorothioate
  modified_base 3: mod_base = OTHER; note = 2'-O-methylguanosine-3'-phosphate
  modified_base 4: mod_base = OTHER; note = 2'-O-methyluridine-3'-phosphate
  modified_base 6: mod_base = OTHER; note = 2'-O-methylcytidine-3'-phosphate
  modified_base 7: mod_base = OTHER; note = Thymidine-glycol nucleic acid (GNA) S-Isomer
  modified_base 8: mod_base = OTHER; note = 2'-O-methylcytidine-3'-phosphate
  modified_base 9: mod_base = OTHER; note = 2'-O-methyluridine-3'-phosphate
  modified_base 10: mod_base = OTHER; note = 2'-O-methyluridine-3'-phosphate
  modified_base 11: mod_base = OTHER; note = 2'-O-methylcytidine-3'-phosphate
  modified_base 12: mod_base = OTHER; note = 2'-O-methyladenosine-3'-phosphate
  modified_base 13: mod_base = OTHER; note = 2'-O-methylcytidine-3'-phosphate
  modified_base 14: mod_base = OTHER; note = 2'-fluoroadenosine-3'-phosphate
  modified_base 15: mod_base = OTHER; note = 2'-O-methyladenosine-3'-phosphate
  modified_base 16: mod_base = OTHER; note = 2'-fluorocytidine-3'-phosphate
  modified_base 17: mod_base = OTHER; note = 2'-O-methylguanosine-3'-phosphate
  modified_base 18: mod_base = OTHER; note = 2'-O-methylcytidine-3'-phosphate
  modified_base 19: mod_base = OTHER; note = 2'-O-methyladenosine-3'-phosphate
  modified_base 20: mod_base = OTHER; note = 2'-O-methylguanosine-3'-phosphate
  modified_base 21: mod_base = OTHER; note = 2'-O-methyluridine-3'-phosphorothioate
  modified_base 22: mod_base = OTHER; note = 2'-O-methyluridine-3'-phosphorothioate
  modified_base 23: mod_base = OTHER; note = 2'-O-methyladenosine-3'-phosphate
  misc_feature 1..4: note = RNA
  misc_feature 5: note = DNA
  misc_feature 6: note = RNA
  misc_feature 7: note = DNA
  misc_feature 8..23: note = RNA
tagttctcttcacaacgcagtta

SEQ ID NO: 1068 - DNA, 23 bp, synthetic construct
  source 1..23: mol_type = other DNA
  modified_base 1: mod_base = OTHER; note = Vinyl-phosphonate 2'-O-methyluridine-3'-phosphorothioate
  modified_base 2: mod_base = OTHER; note = 2'-fluorocytidine-3'-phosphorothioate
  modified_base 3: mod_base = OTHER; note = 2'-O-methyladenosine-3'-phosphate
  modified_base 4: mod_base = OTHER; note = 2'-O-methyladenosine-3'-phosphate
  modified_base 6: mod_base = OTHER; note = 2'-O-methyluridine-3'-phosphate
  modified_base 7: mod_base = OTHER; note = Thymidine-glycol nucleic acid (GNA) S-Isomer
  modified_base 8: mod_base = OTHER; note = 2'-O-methylcytidine-3'-phosphate
  modified_base 9: mod_base = OTHER; note = 2'-O-methyluridine-3'-phosphate
  modified_base 10: mod_base = OTHER; note = 2'-O-methylcytidine-3'-phosphate
  modified_base 11: mod_base = OTHER; note = 2'-O-methyluridine-3'-phosphate
  modified_base 12: mod_base = OTHER; note = 2'-O-methyluridine-3'-phosphate
  modified_base 13: mod_base = OTHER; note = 2'-O-methylcytidine-3'-phosphate
  modified_base 14: mod_base = OTHER; note = 2'-fluoroadenosine-3'-phosphate
  modified_base 15: mod_base = OTHER; note = 2'-O-methylcytidine-3'-phosphate
  modified_base 16: mod_base = OTHER; note = 2'-fluoroadenosine-3'-phosphate
  modified_base 17: mod_base = OTHER; note = 2'-O-methyladenosine-3'-phosphate
  modified_base 18: mod_base = OTHER; note = 2'-O-methylcytidine-3'-phosphate
  modified_base 19: mod_base = OTHER; note = 2'-O-methylguanosine-3'-phosphate
  modified_base 20: mod_base = OTHER; note = 2'-O-methylcytidine-3'-phosphate
  modified_base 21: mod_base = OTHER; note = 2'-O-methyladenosine-3'- phosphorothioate
  modified_base 22: mod_base = OTHER; note = 2'-O-methylguanosine-3'- phosphorothioate
  modified_base 23: mod_base = OTHER; note = 2'-O-methyluridine-3'-phosphate
  misc_feature 1..4: note = RNA
  misc_feature 5: note = DNA
  misc_feature 6: note = RNA
  misc_feature 7: note = DNA
  misc_feature 8..23: note = RNA
tcaagttctcttcacaacgcagt

SEQ ID NO: 1069 - RNA, 23 nt, synthetic construct
  source 1..23: mol_type = other RNA
  modified_base 1: mod_base = OTHER; note = Vinyl-phosphonate 2'-O-methyluridine-3'-phosphorothioate
  modified_base 2: mod_base = OTHER; note = 2'-fluorocytidine-3'-phosphorothioate
  modified_base 3: mod_base = OTHER; note = 2'-O-methyladenosine-3'-phosphate
  modified_base 4: mod_base = OTHER; note = 2'-O-methyladenosine-3'-phosphate
  modified_base 5: mod_base = OTHER; note = 2'-O-methylguanosine-3'-phosphate
  modified_base 6: mod_base = OTHER; note = 2'-fluorouridine-3'-phosphate
  modified_base 7: mod_base = OTHER; note = 2'-O-methyluridine-3'-phosphate
  modified_base 8: mod_base = OTHER; note = 2'-fluorocytidine-3'-phosphate
  modified_base 9: mod_base = OTHER; note = 2'-fluorouridine-3'-phosphate
  modified_base 10: mod_base = OTHER; note = 2'-O-methylcytidine-3'-phosphate
  modified_base 11: mod_base = OTHER; note = 2'-O-methyluridine-3'-phosphate
  modified_base 12: mod_base = OTHER; note = 2'-O-methyluridine-3'-phosphate
  modified_base 13: mod_base = OTHER; note = 2'-O-methylcytidine-3'-phosphate
  modified_base 14: mod_base = OTHER; note = 2'-fluoroadenosine-3'-phosphate
  modified_base 15: mod_base = OTHER; note = 2'-O-methylcytidine-3'-phosphate
  modified_base 16: mod_base = OTHER; note = 2'-fluoroadenosine-3'-phosphate
  modified_base 17: mod_base = OTHER; note = 2'-O-methyladenosine-3'-phosphate
  modified_base 18: mod_base = OTHER; note = 2'-O-methylcytidine-3'-phosphate
  modified_base 19: mod_base = OTHER; note = 2'-O-methylguanosine-3'-phosphate
  modified_base 20: mod_base = OTHER; note = 2'-O-methylcytidine-3'-phosphate
  modified_base 21: mod_base = OTHER; note = 2'-O-methyladenosine-3'- phosphorothioate
  modified_base 22: mod_base = OTHER; note = 2'-O-methylguanosine-3'- phosphorothioate
  modified_base 23: mod_base = OTHER; note = 2'-O-methyluridine-3'-phosphate
tcaagttctcttcacaacgcagt

SEQ ID NO: 1070 - DNA, 23 bp, synthetic construct
  source 1..23: mol_type = other DNA
  modified_base 1: mod_base = OTHER; note = Vinyl-phosphonate 2'-O-methyluridine-3'-phosphorothioate
  modified_base 2: mod_base = OTHER; note = 2'-deoxycytidine-3'-phosphorothioate
  modified_base 3: mod_base = OTHER; note = 2'-O-methyladenosine-3'-phosphate
  modified_base 4: mod_base = OTHER; note = 2'-O-methyladenosine-3'-phosphate
  modified_base 6: mod_base = OTHER; note = 2'-O-methyluridine-3'-phosphate
  modified_base 8: mod_base = OTHER; note = 2'-O-methylcytidine-3'-phosphate
  modified_base 9: mod_base = OTHER; note = 2'-O-methyluridine-3'-phosphate
  modified_base 10: mod_base = OTHER; note = 2'-O-methylcytidine-3'-phosphate
  modified_base 11: mod_base = OTHER; note = 2'-O-methyluridine-3'-phosphate
  modified_base 13: mod_base = OTHER; note = 2'-O-methylcytidine-3'-phosphate
  modified_base 14: mod_base = OTHER; note = 2'-fluoroadenosine-3'-phosphate
  modified_base 15: mod_base = OTHER; note = 2'-O-methylcytidine-3'-phosphate
  modified_base 16: mod_base = OTHER; note = 2'-O-methyladenosine-3'-phosphate
  modified_base 17: mod_base = OTHER; note = 2'-O-methyladenosine-3'-phosphate
  modified_base 18: mod_base = OTHER; note = 2'-O-methylcytidine-3'-phosphate
  modified_base 19: mod_base = OTHER; note = 2'-O-methylguanosine-3'-phosphate
  modified_base 20: mod_base = OTHER; note = 2'-O-methylcytidine-3'-phosphate
  modified_base 21: mod_base = OTHER; note = 2'-O-methyladenosine-3'- phosphorothioate
  modified_base 22: mod_base = OTHER; note = 2'-O-methylguanosine-3'- phosphorothioate
  modified_base 23: mod_base = OTHER; note = 2'-O-methyluridine-3'-phosphate
  misc_feature 1: note = RNA
  misc_feature 2: note = DNA
  misc_feature 3..4: note = RNA
  misc_feature 5: note = DNA
  misc_feature 6: note = RNA
  misc_feature 7: note = DNA
  misc_feature 8..11: note = RNA
  misc_feature 12: note = DNA
  misc_feature 13..23: note = RNA
tcaagttctcttcacaacgcagt

SEQ ID NO: 1071 - RNA, 23 nt, synthetic construct
  source 1..23: mol_type = other RNA
  modified_base 1: mod_base = OTHER; note = Vinyl-phosphonate 2'-O-methyluridine-3'-phosphorothioate
  modified_base 2: mod_base = OTHER; note = 2'-fluorocytidine-3'-phosphorothioate
  modified_base 3: mod_base = OTHER; note = 2'-O-methylcytidine-3'-phosphate
  modified_base 4: mod_base = OTHER; note = 2'-O-methyladenosine-3'-phosphate
  modified_base 5: mod_base = OTHER; note = 2'-O-methyladenosine-3'-phosphate
  modified_base 6: mod_base = OTHER; note = 2'-fluoroguanosine-3'-phosphate
  modified_base 7: mod_base = OTHER; note = 2'-O-methyluridine-3'-phosphate
  modified_base 8: mod_base = OTHER; note = 2'-fluorouridine-3'-phosphate
  modified_base 9: mod_base = OTHER; note = 2'-fluorocytidine-3'-phosphate
  modified_base 10: mod_base = OTHER; note = 2'-O-methyluridine-3'-phosphate
  modified_base 11: mod_base = OTHER; note = 2'-O-methylcytidine-3'-phosphate
  modified_base 12: mod_base = OTHER; note = 2'-O-methyluridine-3'-phosphate
  modified_base 13: mod_base = OTHER; note = 2'-O-methyluridine-3'-phosphate
  modified_base 14: mod_base = OTHER; note = 2'-fluorocytidine-3'-phosphate
  modified_base 15: mod_base = OTHER; note = 2'-O-methyladenosine-3'-phosphate
  modified_base 16: mod_base = OTHER; note = 2'-fluorocytidine-3'-phosphate
  modified_base 17: mod_base = OTHER; note = 2'-O-methyladenosine-3'-phosphate
  modified_base 18: mod_base = OTHER; note = 2'-O-methyladenosine-3'-phosphate
  modified_base 19: mod_base = OTHER; note = 2'-O-methylcytidine-3'-phosphate
  modified_base 20: mod_base = OTHER; note = 2'-O-methylguanosine-3'-phosphate
  modified_base 21: mod_base = OTHER; note = 2'-O-methylcytidine-3'- phosphorothioate
  modified_base 22: mod_base = OTHER; note = 2'-O-methyladenosine-3'- phosphorothioate
  modified_base 23: mod_base = OTHER; note = 2'-O-methylguanosine-3'-phosphate
tccaagttctcttcacaacgcag

SEQ ID NO: 1072 - DNA, 23 bp, synthetic construct
  source 1..23: mol_type = other DNA
  modified_base 1: mod_base = OTHER; note = Vinyl-phosphonate 2'-O-methyluridine-3'-phosphorothioate
  modified_base 2: mod_base = OTHER; note = 2'-deoxycytidine-3'-phosphorothioate
  modified_base 3: mod_base = OTHER; note = 2'-O-methylcytidine-3'-phosphate
  modified_base 4: mod_base = OTHER; note = 2'-O-methyladenosine-3'-phosphate
  modified_base 6: mod_base = OTHER; note = 2'-O-methylguanosine-3'-phosphate
  modified_base 8: mod_base = OTHER; note = 2'-O-methyluridine-3'-phosphate
  modified_base 9: mod_base = OTHER; note = 2'-O-methylcytidine-3'-phosphate
  modified_base 10: mod_base = OTHER; note = 2'-O-methyluridine-3'-phosphate
  modified_base 11: mod_base = OTHER; note = 2'-O-methylcytidine-3'-phosphate
  modified_base 13: mod_base = OTHER; note = 2'-O-methyluridine-3'-phosphate
  modified_base 14: mod_base = OTHER; note = 2'-fluorocytidine-3'-phosphate
  modified_base 15: mod_base = OTHER; note = 2'-O-methyladenosine-3'-phosphate
  modified_base 16: mod_base = OTHER; note = 2'-O-methylcytidine-3'-phosphate
  modified_base 17: mod_base = OTHER; note = 2'-O-methyladenosine-3'-phosphate
  modified_base 18: mod_base = OTHER; note = 2'-O-methyladenosine-3'-phosphate
  modified_base 19: mod_base = OTHER; note = 2'-O-methylcytidine-3'-phosphate
  modified_base 20: mod_base = OTHER; note = 2'-O-methylguanosine-3'-phosphate
  modified_base 21: mod_base = OTHER; note = 2'-O-methylcytidine-3'- phosphorothioate
  modified_base 22: mod_base = OTHER; note = 2'-O-methyladenosine-3'- phosphorothioate
  modified_base 23: mod_base = OTHER; note = 2'-O-methylguanosine-3'-phosphate
  misc_feature 1: note = RNA
  misc_feature 2: note = DNA
  misc_feature 3..4: note = RNA
  misc_feature 5: note = DNA
  misc_feature 6: note = RNA
  misc_feature 7: note = DNA
  misc_feature 8..11: note = RNA
  misc_feature 12: note = DNA
  misc_feature 13..23: note = RNA
tccaagttctcttcacaacgcag

SEQ ID NO: 1073 - RNA, 23 nt, synthetic construct
  source 1..23: mol_type = other RNA
  modified_base 1: mod_base = OTHER; note = Vinyl-phosphonate 2'-O-methyluridine-3'-phosphorothioate
  modified_base 2: mod_base = OTHER; note = 2'-fluorocytidine-3'-phosphorothioate
  modified_base 3: mod_base = OTHER; note = 2'-O-methyluridine-3'-phosphate
  modified_base 4: mod_base = OTHER; note = 2'-O-methylcytidine-3'-phosphate
  modified_base 5: mod_base = OTHER; note = 2'-O-methylcytidine-3'-phosphate
  modified_base 6: mod_base = OTHER; note = 2'-fluoroadenosine-3'-phosphate
  modified_base 7: mod_base = OTHER; note = 2'-O-methyladenosine-3'-phosphate
  modified_base 8: mod_base = OTHER; note = 2'-fluoroguanosine-3'-phosphate
  modified_base 9: mod_base = OTHER; note = 2'-fluorouridine-3'-phosphate
  modified_base 10: mod_base = OTHER; note = 2'-O-methyluridine-3'-phosphate
  modified_base 11: mod_base = OTHER; note = 2'-O-methylcytidine-3'-phosphate
  modified_base 12: mod_base = OTHER; note = 2'-O-methyluridine-3'-phosphate
  modified_base 13: mod_base = OTHER; note = 2'-O-methylcytidine-3'-phosphate
  modified_base 14: mod_base = OTHER; note = 2'-fluorouridine-3'-phosphate
  modified_base 15: mod_base = OTHER; note = 2'-O-methyluridine-3'-phosphate
  modified_base 16: mod_base = OTHER; note = 2'-fluorocytidine-3'-phosphate
  modified_base 17: mod_base = OTHER; note = 2'-O-methyladenosine-3'-phosphate
  modified_base 18: mod_base = OTHER; note = 2'-O-methylcytidine-3'-phosphate
  modified_base 19: mod_base = OTHER; note = 2'-O-methyladenosine-3'-phosphate
  modified_base 20: mod_base = OTHER; note = 2'-O-methyladenosine-3'-phosphate
  modified_base 21: mod_base = OTHER; note = 2'-O-methylcytidine-3'- phosphorothioate
  modified_base 22: mod_base = OTHER; note = 2'-O-methylguanosine-3'- phosphorothioate
  modified_base 23: mod_base = OTHER; note = 2'-O-methylcytidine-3'-phosphate
tctccaagttctcttcacaacgc

SEQ ID NO: 1074 - DNA, 23 bp, synthetic construct
  source 1..23: mol_type = other DNA
  modified_base 1: mod_base = OTHER; note = Vinyl-phosphonate 2'-O-methyluridine-3'-phosphorothioate
  modified_base 2: mod_base = OTHER; note = 2'-deoxycytidine-3'-phosphorothioate
  modified_base 3: mod_base = OTHER; note = 2'-O-methyluridine-3'-phosphate
  modified_base 4: mod_base = OTHER; note = 2'-O-methylcytidine-3'-phosphate
  modified_base 6: mod_base = OTHER; note = 2'-O-methyladenosine-3'-phosphate
  modified_base 8: mod_base = OTHER; note = 2'-O-methylguanosine-3'-phosphate
  modified_base 9: mod_base = OTHER; note = 2'-O-methyluridine-3'-phosphate
  modified_base 10: mod_base = OTHER; note = 2'-O-methyluridine-3'-phosphate
  modified_base 11: mod_base = OTHER; note = 2'-O-methylcytidine-3'-phosphate
  modified_base 13: mod_base = OTHER; note = 2'-O-methylcytidine-3'-phosphate
  modified_base 14: mod_base = OTHER; note = 2'-fluorouridine-3'-phosphate
  modified_base 15: mod_base = OTHER; note = 2'-O-methyluridine-3'-phosphate
  modified_base 16: mod_base = OTHER; note = 2'-O-methylcytidine-3'-phosphate
  modified_base 17: mod_base = OTHER; note = 2'-O-methyladenosine-3'-phosphate
  modified_base 18: mod_base = OTHER; note = 2'-O-methylcytidine-3'-phosphate
  modified_base 19: mod_base = OTHER; note = 2'-O-methyladenosine-3'-phosphate
  modified_base 20: mod_base = OTHER; note = 2'-O-methyladenosine-3'-phosphate
  modified_base 21: mod_base = OTHER; note = 2'-O-methylcytidine-3'- phosphorothioate
  modified_base 22: mod_base = OTHER; note = 2'-O-methylguanosine-3'- phosphorothioate
  modified_base 23: mod_base = OTHER; note = 2'-O-methylcytidine-3'-phosphate
  misc_feature 1: note = RNA
  misc_feature 2: note = DNA
  misc_feature 3..4: note = RNA
  misc_feature 5: note = DNA
  misc_feature 6: note = RNA
  misc_feature 7: note = DNA
  misc_feature 8..11: note = RNA
  misc_feature 12: note = DNA
  misc_feature 13..23: note = RNA
tctccaagttctcttcacaacgc

SEQ ID NO: 1075 - RNA, 23 nt, synthetic construct
  source 1..23: mol_type = other RNA
  modified_base 1: mod_base = OTHER; note = Vinyl-phosphonate 2'-O-methyluridine-3'-phosphorothioate
  modified_base 2: mod_base = OTHER; note = 2'-fluorocytidine-3'-phosphorothioate
  modified_base 3: mod_base = OTHER; note = 2'-O-methyluridine-3'-phosphate
  modified_base 4: mod_base = OTHER; note = 2'-O-methylcytidine-3'-phosphate
  modified_base 5: mod_base = OTHER; note = 2'-O-methylcytidine-3'-phosphate
  modified_base 6: mod_base = OTHER; note = 2'-fluorouridine-3'-phosphate
  modified_base 7: mod_base = OTHER; note = 2'-O-methylcytidine-3'-phosphate
  modified_base 8: mod_base = OTHER; note = 2'-fluorocytidine-3'-phosphate
  modified_base 9: mod_base = OTHER; note = 2'-fluoroadenosine-3'-phosphate
  modified_base 10: mod_base = OTHER; note = 2'-O-methyladenosine-3'-phosphate
  modified_base 11: mod_base = OTHER; note = 2'-O-methylguanosine-3'-phosphate
  modified_base 12: mod_base = OTHER; note = 2'-O-methyluridine-3'-phosphate
  modified_base 13: mod_base = OTHER; note = 2'-O-methyluridine-3'-phosphate
  modified_base 14: mod_base = OTHER; note = 2'-fluorocytidine-3'-phosphate
  modified_base 15: mod_base = OTHER; note = 2'-O-methyluridine-3'-phosphate
  modified_base 16: mod_base = OTHER; note = 2'-fluorocytidine-3'-phosphate
  modified_base 17: mod_base = OTHER; note = 2'-O-methyluridine-3'-phosphate
  modified_base 18: mod_base = OTHER; note = 2'-O-methyluridine-3'-phosphate
  modified_base 19: mod_base = OTHER; note = 2'-O-methylcytidine-3'-phosphate
  modified_base 20: mod_base = OTHER; note = 2'-O-methyladenosine-3'-phosphate
  modified_base 21: mod_base = OTHER; note = 2'-O-methylcytidine-3'- phosphorothioate
  modified_base 22: mod_base = OTHER; note = 2'-O-methyladenosine-3'- phosphorothioate
  modified_base 23: mod_base = OTHER; note = 2'-O-methyladenosine-3'-phosphate
tctcctccaagttctcttcacaa

SEQ ID NO: 1076 - DNA, 23 bp, synthetic construct
  source 1..23: mol_type = other DNA
  modified_base 1: mod_base = OTHER; note = Vinyl-phosphonate 2'-O-methyluridine-3'-phosphorothioate
  modified_base 2: mod_base = OTHER; note = 2'-deoxycytidine-3'-phosphorothioate
  modified_base 3: mod_base = OTHER; note = 2'-O-methyluridine-3'-phosphate
  modified_base 4: mod_base = OTHER; note = 2'-O-methylcytidine-3'-phosphate
  modified_base 6: mod_base = OTHER; note = 2'-O-methyluridine-3'-phosphate
  modified_base 8: mod_base = OTHER; note = 2'-O-methylcytidine-3'-phosphate
  modified_base 9: mod_base = OTHER; note = 2'-O-methyladenosine-3'-phosphate
  modified_base 10: mod_base = OTHER; note = 2'-O-methyladenosine-3'-phosphate
  modified_base 11: mod_base = OTHER; note = 2'-O-methylguanosine-3'-phosphate
  modified_base 13: mod_base = OTHER; note = 2'-O-methyluridine-3'-phosphate
  modified_base 14: mod_base = OTHER; note = 2'-fluorocytidine-3'-phosphate
  modified_base 15: mod_base = OTHER; note = 2'-O-methyluridine-3'-phosphate
  modified_base 16: mod_base = OTHER; note = 2'-O-methylcytidine-3'-phosphate
  modified_base 17: mod_base = OTHER; note = 2'-O-methyluridine-3'-phosphate
  modified_base 18: mod_base = OTHER; note = 2'-O-methyluridine-3'-phosphate
  modified_base 19: mod_base = OTHER; note = 2'-O-methylcytidine-3'-phosphate
  modified_base 20: mod_base = OTHER; note = 2'-O-methyladenosine-3'-phosphate
  modified_base 21: mod_base = OTHER; note = 2'-O-methylcytidine-3'- phosphorothioate
  modified_base 22: mod_base = OTHER; note = 2'-O-methyladenosine-3'- phosphorothioate
  modified_base 23: mod_base = OTHER; note = 2'-O-methyladenosine-3'-phosphate
  misc_feature 1: note = RNA
  misc_feature 2: note = DNA
  misc_feature 3..4: note = RNA
  misc_feature 5: note = DNA
  misc_feature 6: note = RNA
  misc_feature 7: note = DNA
  misc_feature 8..11: note = RNA
  misc_feature 12: note = DNA
  misc_feature 13..23: note = RNA
tctcctccaagttctcttcacaa

SEQ ID NO: 1077 - DNA, 23 bp, synthetic construct
  source 1..23: mol_type = other DNA
  modified_base 1: mod_base = OTHER; note = Vinyl-phosphonate 2'-O-methyluridine-3'-phosphorothioate
  modified_base 2: mod_base = OTHER; note = 2'-fluoroguanosine-3'-phosphorothioate
  modified_base 3: mod_base = OTHER; note = 2'-O-methylcytidine-3'-phosphate
  modified_base 4: mod_base = OTHER; note = 2'-O-methyluridine-3'-phosphate
  modified_base 6: mod_base = OTHER; note = 2'-O-methylcytidine-3'-phosphate
  modified_base 7: mod_base = OTHER; note = Thymidine-glycol nucleic acid (GNA) S-Isomer
  modified_base 8: mod_base = OTHER; note = 2'-O-methylcytidine-3'-phosphate
  modified_base 9: mod_base = OTHER; note = 2'-O-methylcytidine-3'-phosphate
  modified_base 10: mod_base = OTHER; note = 2'-O-methyladenosine-3'-phosphate
  modified_base 11: mod_base = OTHER; note = 2'-O-methyladenosine-3'-phosphate
  modified_base 12: mod_base = OTHER; note = 2'-O-methylguanosine-3'-phosphate
  modified_base 13: mod_base = OTHER; note = 2'-O-methyluridine-3'-phosphate
  modified_base 14: mod_base = OTHER; note = 2'-fluorouridine-3'-phosphate
  modified_base 15: mod_base = OTHER; note = 2'-O-methylcytidine-3'-phosphate
  modified_base 16: mod_base = OTHER; note = 2'-fluorouridine-3'-phosphate
  modified_base 17: mod_base = OTHER; note = 2'-O-methylcytidine-3'-phosphate
  modified_base 18: mod_base = OTHER; note = 2'-O-methyluridine-3'-phosphate
  modified_base 19: mod_base = OTHER; note = 2'-O-methyluridine-3'-phosphate
  modified_base 20: mod_base = OTHER; note = 2'-O-methylcytidine-3'-phosphate
  modified_base 21: mod_base = OTHER; note = 2'-O-methyladenosine-3'- phosphorothioate
  modified_base 22: mod_base = OTHER; note = 2'-O-methylcytidine-3'- phosphorothioate
  modified_base 23: mod_base = OTHER; note = 2'-O-methyladenosine-3'-phosphate
  misc_feature 1..4: note = RNA
  misc_feature 5: note = DNA
  misc_feature 6: note = RNA
  misc_feature 7: note = DNA
  misc_feature 8..23: note = RNA
tgctcctccaagttctcttcaca

SEQ ID NO: 1078 - DNA, 23 bp, synthetic construct
  source 1..23: mol_type = other DNA
  modified_base 1: mod_base = OTHER; note = Vinyl-phosphonate 2'-O-methyluridine-3'-phosphorothioate
  modified_base 2: mod_base = OTHER; note = 2'-fluorouridine -3'-phosphorothioate
  modified_base 3: mod_base = OTHER; note = 2'-O-methylcytidine-3'-phosphate
  modified_base 4: mod_base = OTHER; note = 2'-O-methylguanosine-3'-phosphate
  modified_base 6: mod_base = OTHER; note = 2'-O-methylcytidine-3'-phosphate
  modified_base 7: mod_base = OTHER; note = Thymidine-glycol nucleic acid (GNA) S-Isomer
  modified_base 8: mod_base = OTHER; note = 2'-O-methylcytidine-3'-phosphate
  modified_base 9: mod_base = OTHER; note = 2'-O-methylcytidine-3'-phosphate
  modified_base 10: mod_base = OTHER; note = 2'-O-methyluridine-3'-phosphate
  modified_base 11: mod_base = OTHER; note = 2'-O-methylcytidine-3'-phosphate
  modified_base 12: mod_base = OTHER; note = 2'-O-methylcytidine-3'-phosphate
  modified_base 13: mod_base = OTHER; note = 2'-O-methyladenosine-3'-phosphate
  modified_base 14: mod_base = OTHER; note = 2'-fluoroadenosine-3'-phosphate
  modified_base 15: mod_base = OTHER; note = 2'-O-methylguanosine-3'-phosphate
  modified_base 16: mod_base = OTHER; note = 2'-fluorouridine-3'-phosphate
  modified_base 17: mod_base = OTHER; note = 2'-O-methyluridine-3'-phosphate
  modified_base 18: mod_base = OTHER; note = 2'-O-methylcytidine-3'-phosphate
  modified_base 19: mod_base = OTHER; note = 2'-O-methyluridine-3'-phosphate
  modified_base 20: mod_base = OTHER; note = 2'-O-methylcytidine-3'-phosphate
  modified_base 21: mod_base = OTHER; note = 2'-O-methyluridine-3'-phosphorothioate
  modified_base 22: mod_base = OTHER; note = 2'-O-methyluridine-3'-phosphorothioate
  modified_base 23: mod_base = OTHER; note = 2'-O-methylcytidine-3'-phosphate
  misc_feature 1..4: note = RNA
  misc_feature 5: note = DNA
  misc_feature 6: note = RNA
  misc_feature 7: note = DNA
  misc_feature 8..23: note = RNA
ttcggctcctccaagttctcttc

SEQ ID NO: 1079 - RNA, 23 nt, synthetic construct
  source 1..23: mol_type = other RNA
  modified_base 1: mod_base = OTHER; note = Vinyl-phosphonate 2'-O-methyluridine-3'-phosphorothioate
  modified_base 2: mod_base = OTHER; note = 2'-fluorocytidine-3'-phosphorothioate
  modified_base 3: mod_base = OTHER; note = 2'-O-methyluridine-3'-phosphate
  modified_base 4: mod_base = OTHER; note = 2'-O-methylcytidine-3'-phosphate
  modified_base 5: mod_base = OTHER; note = 2'-O-methylguanosine-3'-phosphate
  modified_base 6: mod_base = OTHER; note = 2'-fluoroguanosine-3'-phosphate
  modified_base 7: mod_base = OTHER; note = 2'-O-methylcytidine-3'-phosphate
  modified_base 8: mod_base = OTHER; note = 2'-fluorouridine-3'-phosphate
  modified_base 9: mod_base = OTHER; note = 2'-fluorocytidine-3'-phosphate
  modified_base 10: mod_base = OTHER; note = 2'-O-methylcytidine-3'-phosphate
  modified_base 11: mod_base = OTHER; note = 2'-O-methyluridine-3'-phosphate
  modified_base 12: mod_base = OTHER; note = 2'-O-methylcytidine-3'-phosphate
  modified_base 13: mod_base = OTHER; note = 2'-O-methylcytidine-3'-phosphate
  modified_base 14: mod_base = OTHER; note = 2'-fluoroadenosine-3'-phosphate
  modified_base 15: mod_base = OTHER; note = 2'-O-methyladenosine-3'-phosphate
  modified_base 16: mod_base = OTHER; note = 2'-fluoroguanosine-3'-phosphate
  modified_base 17: mod_base = OTHER; note = 2'-O-methyluridine-3'-phosphate
  modified_base 18: mod_base = OTHER; note = 2'-O-methyluridine-3'-phosphate
  modified_base 19: mod_base = OTHER; note = 2'-O-methylcytidine-3'-phosphate
  modified_base 20: mod_base = OTHER; note = 2'-O-methyluridine-3'-phosphate
  modified_base 21: mod_base = OTHER; note = 2'-O-methylcytidine-3'- phosphorothioate
  modified_base 22: mod_base = OTHER; note = 2'-O-methyluridine-3'-phosphorothioate
  modified_base 23: mod_base = OTHER; note = 2'-O-methyluridine-3'-phosphate
tctcggctcctccaagttctctt

SEQ ID NO: 1080 - DNA, 23 bp, synthetic construct
  source 1..23: mol_type = other DNA
  modified_base 1: mod_base = OTHER; note = Vinyl-phosphonate 2'-O-methyluridine-3'-phosphorothioate
  modified_base 2: mod_base = OTHER; note = 2'-deoxycytidine-3'-phosphorothioate
  modified_base 3: mod_base = OTHER; note = 2'-O-methyluridine-3'-phosphate
  modified_base 4: mod_base = OTHER; note = 2'-O-methylcytidine-3'-phosphate
  modified_base 6: mod_base = OTHER; note = 2'-O-methylguanosine-3'-phosphate
  modified_base 8: mod_base = OTHER; note = 2'-O-methyluridine-3'-phosphate
  modified_base 9: mod_base = OTHER; note = 2'-O-methylcytidine-3'-phosphate
  modified_base 10: mod_base = OTHER; note = 2'-O-methylcytidine-3'-phosphate
  modified_base 11: mod_base = OTHER; note = 2'-O-methyluridine-3'-phosphate
  modified_base 13: mod_base = OTHER; note = 2'-O-methylcytidine-3'-phosphate
  modified_base 14: mod_base = OTHER; note = 2'-fluoroadenosine-3'-phosphate
  modified_base 15: mod_base = OTHER; note = 2'-O-methyladenosine-3'-phosphate
  modified_base 16: mod_base = OTHER; note = 2'-O-methylguanosine-3'-phosphate
  modified_base 17: mod_base = OTHER; note = 2'-O-methyluridine-3'-phosphate
  modified_base 18: mod_base = OTHER; note = 2'-O-methyluridine-3'-phosphate
  modified_base 19: mod_base = OTHER; note = 2'-O-methylcytidine-3'-phosphate
  modified_base 20: mod_base = OTHER; note = 2'-O-methyluridine-3'-phosphate
  modified_base 21: mod_base = OTHER; note = 2'-O-methylcytidine-3'- phosphorothioate
  modified_base 22: mod_base = OTHER; note = 2'-O-methyluridine-3'-phosphorothioate
  modified_base 23: mod_base = OTHER; note = 2'-O-methyluridine-3'-phosphate
  misc_feature 1: note = RNA
  misc_feature 2: note = DNA
  misc_feature 3..4: note = RNA
  misc_feature 5: note = DNA
  misc_feature 6: note = RNA
  misc_feature 7: note = DNA
  misc_feature 8..11: note = RNA
  misc_feature 12: note = DNA
  misc_feature 13..23: note = RNA
tctcggctcctccaagttctctt

SEQ ID NO: 1081 - RNA, 23 nt, synthetic construct
  source 1..23: mol_type = other RNA
  modified_base 1: mod_base = OTHER; note = Vinyl-phosphonate 2'-O-methyluridine-3'-phosphorothioate
  modified_base 2: mod_base = OTHER; note = 2'-fluorocytidine-3'-phosphorothioate
  modified_base 3: mod_base = OTHER; note = 2'-O-methyladenosine-3'-phosphate
  modified_base 4: mod_base = OTHER; note = 2'-O-methyladenosine-3'-phosphate
  modified_base 5: mod_base = OTHER; note = 2'-O-methyladenosine-3'-phosphate
  modified_base 6: mod_base = OTHER; note = 2'-fluorouridine-3'-phosphate
  modified_base 7: mod_base = OTHER; note = 2'-O-methylcytidine-3'-phosphate
  modified_base 8: mod_base = OTHER; note = 2'-fluorouridine-3'-phosphate
  modified_base 9: mod_base = OTHER; note = 2'-fluorocytidine-3'-phosphate
  modified_base 10: mod_base = OTHER; note = 2'-O-methylguanosine-3'-phosphate
  modified_base 11: mod_base = OTHER; note = 2'-O-methylguanosine-3'-phosphate
  modified_base 12: mod_base = OTHER; note = 2'-O-methylcytidine-3'-phosphate
  modified_base 13: mod_base = OTHER; note = 2'-O-methyluridine-3'-phosphate
  modified_base 14: mod_base = OTHER; note = 2'-fluorocytidine-3'-phosphate
  modified_base 15: mod_base = OTHER; note = 2'-O-methylcytidine-3'-phosphate
  modified_base 16: mod_base = OTHER; note = 2'-fluorouridine-3'-phosphate
  modified_base 17: mod_base = OTHER; note = 2'-O-methylcytidine-3'-phosphate
  modified_base 18: mod_base = OTHER; note = 2'-O-methylcytidine-3'-phosphate
  modified_base 19: mod_base = OTHER; note = 2'-O-methyladenosine-3'-phosphate
  modified_base 20: mod_base = OTHER; note = 2'-O-methyladenosine-3'-phosphate
  modified_base 21: mod_base = OTHER; note = 2'-O-methylguanosine-3'- phosphorothioate
  modified_base 22: mod_base = OTHER; note = 2'-O-methyluridine-3'-phosphorothioate
  modified_base 23: mod_base = OTHER; note = 2'-O-methyluridine-3'-phosphate
tcaaatctcggctcctccaagtt

SEQ ID NO: 1082 - DNA, 23 bp, synthetic construct
  source 1..23: mol_type = other DNA
  modified_base 1: mod_base = OTHER; note = Vinyl-phosphonate 2'-O-methyluridine-3'-phosphorothioate
  modified_base 2: mod_base = OTHER; note = 2'-deoxycytidine-3'-phosphorothioate
  modified_base 3: mod_base = OTHER; note = 2'-O-methyladenosine-3'-phosphate
  modified_base 4: mod_base = OTHER; note = 2'-O-methyladenosine-3'-phosphate
  modified_base 6: mod_base = OTHER; note = 2'-O-methyluridine-3'-phosphate
  modified_base 8: mod_base = OTHER; note = 2'-O-methyluridine-3'-phosphate
  modified_base 9: mod_base = OTHER; note = 2'-O-methylcytidine-3'-phosphate
  modified_base 10: mod_base = OTHER; note = 2'-O-methylguanosine-3'-phosphate
  modified_base 11: mod_base = OTHER; note = 2'-O-methylguanosine-3'-phosphate
  modified_base 13: mod_base = OTHER; note = 2'-O-methyluridine-3'-phosphate
  modified_base 14: mod_base = OTHER; note = 2'-fluorocytidine-3'-phosphate
  modified_base 15: mod_base = OTHER; note = 2'-O-methylcytidine-3'-phosphate
  modified_base 16: mod_base = OTHER; note = 2'-O-methyluridine-3'-phosphate
  modified_base 17: mod_base = OTHER; note = 2'-O-methylcytidine-3'-phosphate
  modified_base 18: mod_base = OTHER; note = 2'-O-methylcytidine-3'-phosphate
  modified_base 19: mod_base = OTHER; note = 2'-O-methyladenosine-3'-phosphate
  modified_base 20: mod_base = OTHER; note = 2'-O-methyladenosine-3'-phosphate
  modified_base 21: mod_base = OTHER; note = 2'-O-methylguanosine-3'- phosphorothioate
  modified_base 22: mod_base = OTHER; note = 2'-O-methyluridine-3'-phosphorothioate
  modified_base 23: mod_base = OTHER; note = 2'-O-methyluridine-3'-phosphate
  misc_feature 1: note = RNA
  misc_feature 2: note = DNA
  misc_feature 3..4: note = RNA
  misc_feature 5: note = DNA
  misc_feature 6: note = RNA
  misc_feature 7: note = DNA
  misc_feature 8..11: note = RNA
  misc_feature 12: note = DNA
  misc_feature 13..23: note = RNA
tcaaatctcggctcctccaagtt

SEQ ID NO: 1083 - RNA, 23 nt, synthetic construct
  source 1..23: mol_type = other RNA
  modified_base 1: mod_base = OTHER; note = Vinyl-phosphonate 2'-O-methyluridine-3'-phosphorothioate
  modified_base 2: mod_base = OTHER; note = 2'-fluoroguanosine-3'-phosphorothioate
  modified_base 3: mod_base = OTHER; note = 2'-O-methylcytidine-3'-phosphate
  modified_base 4: mod_base = OTHER; note = 2'-O-methyladenosine-3'-phosphate
  modified_base 5: mod_base = OTHER; note = 2'-O-methyladenosine-3'-phosphate
  modified_base 6: mod_base = OTHER; note = 2'-fluoroadenosine-3'-phosphate
  modified_base 7: mod_base = OTHER; note = 2'-O-methyluridine-3'-phosphate
  modified_base 8: mod_base = OTHER; note = 2'-fluorocytidine-3'-phosphate
  modified_base 9: mod_base = OTHER; note = 2'-fluorouridine-3'-phosphate
  modified_base 10: mod_base = OTHER; note = 2'-O-methylcytidine-3'-phosphate
  modified_base 11: mod_base = OTHER; note = 2'-O-methylguanosine-3'-phosphate
  modified_base 12: mod_base = OTHER; note = 2'-O-methylguanosine-3'-phosphate
  modified_base 13: mod_base = OTHER; note = 2'-O-methylcytidine-3'-phosphate
  modified_base 14: mod_base = OTHER; note = 2'-fluorouridine-3'-phosphate
  modified_base 15: mod_base = OTHER; note = 2'-O-methylcytidine-3'-phosphate
  modified_base 16: mod_base = OTHER; note = 2'-fluorocytidine-3'-phosphate
  modified_base 17: mod_base = OTHER; note = 2'-O-methyluridine-3'-phosphate
  modified_base 18: mod_base = OTHER; note = 2'-O-methylcytidine-3'-phosphate
  modified_base 19: mod_base = OTHER; note = 2'-O-methylcytidine-3'-phosphate
  modified_base 20: mod_base = OTHER; note = 2'-O-methyladenosine-3'-phosphate
  modified_base 21: mod_base = OTHER; note = 2'-O-methyladenosine-3'- phosphorothioate
  modified_base 22: mod_base = OTHER; note = 2'-O-methylguanosine-3'- phosphorothioate
  modified_base 23: mod_base = OTHER; note = 2'-O-methyluridine-3'-phosphate
tgcaaatctcggctcctccaagt

SEQ ID NO: 1084 - DNA, 23 bp, synthetic construct
  source 1..23: mol_type = other DNA
  modified_base 1: mod_base = OTHER; note = Vinyl-phosphonate 2'-O-methyluridine-3'-phosphorothioate
  modified_base 2: mod_base = OTHER; note = 2'-deoxyguanosine-3'-phosphorothioate
  modified_base 3: mod_base = OTHER; note = 2'-O-methylcytidine-3'-phosphate
  modified_base 4: mod_base = OTHER; note = 2'-O-methyladenosine-3'-phosphate
  modified_base 6: mod_base = OTHER; note = 2'-O-methyladenosine-3'-phosphate
  modified_base 8: mod_base = OTHER; note = 2'-O-methylcytidine-3'-phosphate
  modified_base 9: mod_base = OTHER; note = 2'-O-methyluridine-3'-phosphate
  modified_base 10: mod_base = OTHER; note = 2'-O-methylcytidine-3'-phosphate
  modified_base 11: mod_base = OTHER; note = 2'-O-methylguanosine-3'-phosphate
  modified_base 13: mod_base = OTHER; note = 2'-O-methylcytidine-3'-phosphate
  modified_base 14: mod_base = OTHER; note = 2'-fluorouridine-3'-phosphate
  modified_base 15: mod_base = OTHER; note = 2'-O-methylcytidine-3'-phosphate
  modified_base 16: mod_base = OTHER; note = 2'-O-methylcytidine-3'-phosphate
  modified_base 17: mod_base = OTHER; note = 2'-O-methyluridine-3'-phosphate
  modified_base 18: mod_base = OTHER; note = 2'-O-methylcytidine-3'-phosphate
  modified_base 19: mod_base = OTHER; note = 2'-O-methylcytidine-3'-phosphate
  modified_base 20: mod_base = OTHER; note = 2'-O-methyladenosine-3'-phosphate
  modified_base 21: mod_base = OTHER; note = 2'-O-methyladenosine-3'- phosphorothioate
  modified_base 22: mod_base = OTHER; note = 2'-O-methylguanosine-3'- phosphorothioate
  modified_base 23: mod_base = OTHER; note = 2'-O-methyluridine-3'-phosphate
  misc_feature 1: note = RNA
  misc_feature 2: note = DNA
  misc_feature 3..4: note = RNA
  misc_feature 5: note = DNA
  misc_feature 6: note = RNA
  misc_feature 7: note = DNA
  misc_feature 8..11: note = RNA
  misc_feature 12: note = DNA
  misc_feature 13..23: note = RNA
tgcaaatctcggctcctccaagt

SEQ ID NO: 1085 - RNA, 23 nt, synthetic construct
  source 1..23: mol_type = other RNA
  modified_base 1: mod_base = OTHER; note = Vinyl-phosphonate 2'-O-methyluridine-3'-phosphorothioate
  modified_base 2: mod_base = OTHER; note = 2'-fluoroadenosine-3'-phosphorothioate
  modified_base 3: mod_base = OTHER; note = 2'-O-methylguanosine-3'-phosphate
  modified_base 4: mod_base = OTHER; note = 2'-O-methylcytidine-3'-phosphate
  modified_base 5: mod_base = OTHER; note = 2'-O-methyladenosine-3'-phosphate
  modified_base 6: mod_base = OTHER; note = 2'-fluoroadenosine-3'-phosphate
  modified_base 7: mod_base = OTHER; note = 2'-O-methyladenosine-3'-phosphate
  modified_base 8: mod_base = OTHER; note = 2'-fluorouridine-3'-phosphate
  modified_base 9: mod_base = OTHER; note = 2'-fluorocytidine-3'-phosphate
  modified_base 10: mod_base = OTHER; note = 2'-O-methyluridine-3'-phosphate
  modified_base 11: mod_base = OTHER; note = 2'-O-methylcytidine-3'-phosphate
  modified_base 12: mod_base = OTHER; note = 2'-O-methylguanosine-3'-phosphate
  modified_base 13: mod_base = OTHER; note = 2'-O-methylguanosine-3'-phosphate
  modified_base 14: mod_base = OTHER; note = 2'-fluorocytidine-3'-phosphate
  modified_base 15: mod_base = OTHER; note = 2'-O-methyluridine-3'-phosphate
  modified_base 16: mod_base = OTHER; note = 2'-fluorocytidine-3'-phosphate
  modified_base 17: mod_base = OTHER; note = 2'-O-methylcytidine-3'-phosphate
  modified_base 18: mod_base = OTHER; note = 2'-O-methyluridine-3'-phosphate
  modified_base 19: mod_base = OTHER; note = 2'-O-methylcytidine-3'-phosphate
  modified_base 20: mod_base = OTHER; note = 2'-O-methylcytidine-3'-phosphate
  modified_base 21: mod_base = OTHER; note = 2'-O-methyladenosine-3'- phosphorothioate
  modified_base 22: mod_base = OTHER; note = 2'-O-methyladenosine-3'- phosphorothioate
  modified_base 23: mod_base = OTHER; note = 2'-O-methylguanosine-3'-phosphate
tagcaaatctcggctcctccaag

SEQ ID NO: 1086 - DNA, 23 bp, synthetic construct
  source 1..23: mol_type = other DNA
  modified_base 1: mod_base = OTHER; note = Vinyl-phosphonate 2'-O-methyluridine-3'-phosphorothioate
  modified_base 2: mod_base = OTHER; note = 2'-deoxyadenosine-3'-phosphorothioate
  modified_base 3: mod_base = OTHER; note = 2'-O-methylguanosine-3'-phosphate
  modified_base 4: mod_base = OTHER; note = 2'-O-methylcytidine-3'-phosphate
  modified_base 6: mod_base = OTHER; note = 2'-O-methyladenosine-3'-phosphate
  modified_base 8: mod_base = OTHER; note = 2'-O-methyluridine-3'-phosphate
  modified_base 9: mod_base = OTHER; note = 2'-O-methylcytidine-3'-phosphate
  modified_base 10: mod_base = OTHER; note = 2'-O-methyluridine-3'-phosphate
  modified_base 11: mod_base = OTHER; note = 2'-O-methylcytidine-3'-phosphate
  modified_base 13: mod_base = OTHER; note = 2'-O-methylguanosine-3'-phosphate
  modified_base 14: mod_base = OTHER; note = 2'-fluorocytidine-3'-phosphate
  modified_base 15: mod_base = OTHER; note = 2'-O-methyluridine-3'-phosphate
  modified_base 16: mod_base = OTHER; note = 2'-O-methylcytidine-3'-phosphate
  modified_base 17: mod_base = OTHER; note = 2'-O-methylcytidine-3'-phosphate
  modified_base 18: mod_base = OTHER; note = 2'-O-methyluridine-3'-phosphate
  modified_base 19: mod_base = OTHER; note = 2'-O-methylcytidine-3'-phosphate
  modified_base 20: mod_base = OTHER; note = 2'-O-methylcytidine-3'-phosphate
  modified_base 21: mod_base = OTHER; note = 2'-O-methyladenosine-3'- phosphorothioate
  modified_base 22: mod_base = OTHER; note = 2'-O-methyladenosine-3'- phosphorothioate
  modified_base 23: mod_base = OTHER; note = 2'-O-methylguanosine-3'-phosphate
  misc_feature 1: note = RNA
  misc_feature 2: note = DNA
  misc_feature 3..4: note = RNA
  misc_feature 5: note = DNA
  misc_feature 6: note = RNA
  misc_feature 7: note = DNA
  misc_feature 8..11: note = RNA
  misc_feature 12: note = DNA
  misc_feature 13..23: note = RNA
tagcaaatctcggctcctccaag

SEQ ID NO: 1087 - DNA, 23 bp, synthetic construct
  source 1..23: mol_type = other DNA
  modified_base 1: mod_base = OTHER; note = Vinyl-phosphonate 2'-O-methyluridine-3'-phosphorothioate
  modified_base 2: mod_base = OTHER; note = 2'-fluoroguanosine-3'-phosphorothioate
  modified_base 3: mod_base = OTHER; note = 2'-O-methyladenosine-3'-phosphate
  modified_base 4: mod_base = OTHER; note = 2'-O-methylguanosine-3'-phosphate
  modified_base 6: mod_base = OTHER; note = 2'-O-methyladenosine-3'-phosphate
  modified_base 7: mod_base = OTHER; note = Adenosine-glycol nucleic acid (GNA) S-Isomer
  modified_base 8: mod_base = OTHER; note = 2'-O-methyladenosine-3'-phosphate
  modified_base 9: mod_base = OTHER; note = 2'-O-methyluridine-3'-phosphate
  modified_base 10: mod_base = OTHER; note = 2'-O-methylcytidine-3'-phosphate
  modified_base 11: mod_base = OTHER; note = 2'-O-methyluridine-3'-phosphate
  modified_base 12: mod_base = OTHER; note = 2'-O-methylcytidine-3'-phosphate
  modified_base 13: mod_base = OTHER; note = 2'-O-methylguanosine-3'-phosphate
  modified_base 14: mod_base = OTHER; note = 2'-fluoroguanosine-3'-phosphate
  modified_base 15: mod_base = OTHER; note = 2'-O-methylcytidine-3'-phosphate
  modified_base 16: mod_base = OTHER; note = 2'-fluorouridine-3'-phosphate
  modified_base 17: mod_base = OTHER; note = 2'-O-methylcytidine-3'-phosphate
  modified_base 18: mod_base = OTHER; note = 2'-O-methylcytidine-3'-phosphate
  modified_base 19: mod_base = OTHER; note = 2'-O-methyluridine-3'-phosphate
  modified_base 20: mod_base = OTHER; note = 2'-O-methylcytidine-3'-phosphate
  modified_base 21: mod_base = OTHER; note = 2'-O-methylcytidine-3'- phosphorothioate
  modified_base 22: mod_base = OTHER; note = 2'-O-methyladenosine-3'- phosphorothioate
  modified_base 23: mod_base = OTHER; note = 2'-O-methyladenosine-3'-phosphate
  misc_feature 1..4: note = RNA
  misc_feature 5: note = DNA
  misc_feature 6..23: note = RNA
tgagcaaatctcggctcctccaa

SEQ ID NO: 1088 - RNA, 23 nt, synthetic construct
  source 1..23: mol_type = other RNA
  modified_base 1: mod_base = OTHER; note = Vinyl-phosphonate 2'-O-methyluridine-3'-phosphorothioate
  modified_base 2: mod_base = OTHER; note = 2'-fluoroguanosine-3'-phosphorothioate
  modified_base 3: mod_base = OTHER; note = 2'-O-methyladenosine-3'-phosphate
  modified_base 4: mod_base = OTHER; note = 2'-O-methylguanosine-3'-phosphate
  modified_base 5: mod_base = OTHER; note = 2'-O-methylcytidine-3'-phosphate
  modified_base 6: mod_base = OTHER; note = 2'-fluoroadenosine-3'-phosphate
  modified_base 7: mod_base = OTHER; note = 2'-O-methyladenosine-3'-phosphate
  modified_base 8: mod_base = OTHER; note = 2'-fluoroadenosine-3'-phosphate
  modified_base 9: mod_base = OTHER; note = 2'-fluorouridine-3'-phosphate
  modified_base 10: mod_base = OTHER; note = 2'-O-methylcytidine-3'-phosphate
  modified_base 11: mod_base = OTHER; note = 2'-O-methyluridine-3'-phosphate
  modified_base 12: mod_base = OTHER; note = 2'-O-methylcytidine-3'-phosphate
  modified_base 13: mod_base = OTHER; note = 2'-O-methylguanosine-3'-phosphate
  modified_base 14: mod_base = OTHER; note = 2'-fluoroguanosine-3'-phosphate
  modified_base 15: mod_base = OTHER; note = 2'-O-methylcytidine-3'-phosphate
  modified_base 16: mod_base = OTHER; note = 2'-fluorouridine-3'-phosphate
  modified_base 17: mod_base = OTHER; note = 2'-O-methylcytidine-3'-phosphate
  modified_base 18: mod_base = OTHER; note = 2'-O-methylcytidine-3'-phosphate
  modified_base 19: mod_base = OTHER; note = 2'-O-methyluridine-3'-phosphate
  modified_base 20: mod_base = OTHER; note = 2'-O-methylcytidine-3'-phosphate
  modified_base 21: mod_base = OTHER; note = 2'-O-methylcytidine-3'- phosphorothioate
  modified_base 22: mod_base = OTHER; note = 2'-O-methyladenosine-3'- phosphorothioate
  modified_base 23: mod_base = OTHER; note = 2'-O-methyladenosine-3'-phosphate
tgagcaaatctcggctcctccaa

SEQ ID NO: 1089 - DNA, 23 bp, synthetic construct
  source 1..23: mol_type = other DNA
  modified_base 1: mod_base = OTHER; note = Vinyl-phosphonate 2'-O-methyluridine-3'-phosphorothioate
  modified_base 2: mod_base = OTHER; note = 2'-deoxyguanosine-3'-phosphorothioate
  modified_base 3: mod_base = OTHER; note = 2'-O-methyladenosine-3'-phosphate
  modified_base 4: mod_base = OTHER; note = 2'-O-methylguanosine-3'-phosphate
  modified_base 6: mod_base = OTHER; note = 2'-O-methyladenosine-3'-phosphate
  modified_base 8: mod_base = OTHER; note = 2'-O-methyladenosine-3'-phosphate
  modified_base 9: mod_base = OTHER; note = 2'-O-methyluridine-3'-phosphate
  modified_base 10: mod_base = OTHER; note = 2'-O-methylcytidine-3'-phosphate
  modified_base 11: mod_base = OTHER; note = 2'-O-methyluridine-3'-phosphate
  modified_base 13: mod_base = OTHER; note = 2'-O-methylguanosine-3'-phosphate
  modified_base 14: mod_base = OTHER; note = 2'-fluoroguanosine-3'-phosphate
  modified_base 15: mod_base = OTHER; note = 2'-O-methylcytidine-3'-phosphate
  modified_base 16: mod_base = OTHER; note = 2'-O-methyluridine-3'-phosphate
  modified_base 17: mod_base = OTHER; note = 2'-O-methylcytidine-3'-phosphate
  modified_base 18: mod_base = OTHER; note = 2'-O-methylcytidine-3'-phosphate
  modified_base 19: mod_base = OTHER; note = 2'-O-methyluridine-3'-phosphate
  modified_base 20: mod_base = OTHER; note = 2'-O-methylcytidine-3'-phosphate
  modified_base 21: mod_base = OTHER; note = 2'-O-methylcytidine-3'- phosphorothioate
  modified_base 22: mod_base = OTHER; note = 2'-O-methyladenosine-3'- phosphorothioate
  modified_base 23: mod_base = OTHER; note = 2'-O-methyladenosine-3'-phosphate
  misc_feature 1: note = RNA
  misc_feature 2: note = DNA
  misc_feature 3..4: note = RNA
  misc_feature 5: note = DNA
  misc_feature 6: note = RNA
  misc_feature 7: note = DNA
  misc_feature 8..11: note = RNA
  misc_feature 12: note = DNA
  misc_feature 13..23: note = RNA
tgagcaaatctcggctcctccaa

SEQ ID NO: 1090 - DNA, 23 bp, synthetic construct
  source 1..23: mol_type = other DNA
  modified_base 1: mod_base = OTHER; note = Vinyl-phosphonate 2'-O-methyluridine-3'-phosphorothioate
  modified_base 2: mod_base = OTHER; note = 2'-fluorouridine -3'-phosphorothioate
  modified_base 3: mod_base = OTHER; note = 2'-O-methylguanosine-3'-phosphate
  modified_base 4: mod_base = OTHER; note = 2'-O-methyladenosine-3'-phosphate
  modified_base 6: mod_base = OTHER; note = 2'-O-methylcytidine-3'-phosphate
  modified_base 7: mod_base = OTHER; note = Adenosine-glycol nucleic acid (GNA) S-Isomer
  modified_base 8: mod_base = OTHER; note = 2'-O-methyladenosine-3'-phosphate
  modified_base 9: mod_base = OTHER; note = 2'-O-methyladenosine-3'-phosphate
  modified_base 10: mod_base = OTHER; note = 2'-O-methyluridine-3'-phosphate
  modified_base 11: mod_base = OTHER; note = 2'-O-methylcytidine-3'-phosphate
  modified_base 12: mod_base = OTHER; note = 2'-O-methyluridine-3'-phosphate
  modified_base 13: mod_base = OTHER; note = 2'-O-methylcytidine-3'-phosphate
  modified_base 14: mod_base = OTHER; note = 2'-fluoroguanosine-3'-phosphate
  modified_base 15: mod_base = OTHER; note = 2'-O-methylguanosine-3'-phosphate
  modified_base 16: mod_base = OTHER; note = 2'-fluorocytidine-3'-phosphate
  modified_base 17: mod_base = OTHER; note = 2'-O-methyluridine-3'-phosphate
  modified_base 18: mod_base = OTHER; note = 2'-O-methylcytidine-3'-phosphate
  modified_base 19: mod_base = OTHER; note = 2'-O-methylcytidine-3'-phosphate
  modified_base 20: mod_base = OTHER; note = 2'-O-methyluridine-3'-phosphate
  modified_base 21: mod_base = OTHER; note = 2'-O-methylcytidine-3'- phosphorothioate
  modified_base 22: mod_base = OTHER; note = 2'-O-methylcytidine-3'- phosphorothioate
  modified_base 23: mod_base = OTHER; note = 2'-O-methyladenosine-3'-phosphate
  misc_feature 1..4: note = RNA
  misc_feature 5: note = DNA
  misc_feature 6..23: note = RNA
ttgagcaaatctcggctcctcca

SEQ ID NO: 1091 - DNA, 23 bp, synthetic construct
  source 1..23: mol_type = other DNA
  modified_base 1: mod_base = OTHER; note = Vinyl-phosphonate 2'-O-methyluridine-3'-phosphorothioate
  modified_base 2: mod_base = OTHER; note = 2'-fluorocytidine-3'-phosphorothioate
  modified_base 3: mod_base = OTHER; note = 2'-O-methyladenosine-3'-phosphate
  modified_base 4: mod_base = OTHER; note = 2'-O-methylcytidine-3'-phosphate
  modified_base 6: mod_base = OTHER; note = 2'-O-methylguanosine-3'-phosphate
  modified_base 7: mod_base = OTHER; note = Adenosine-glycol nucleic acid (GNA) S-Isomer
  modified_base 8: mod_base = OTHER; note = 2'-O-methylguanosine-3'-phosphate
  modified_base 9: mod_base = OTHER; note = 2'-O-methylcytidine-3'-phosphate
  modified_base 10: mod_base = OTHER; note = 2'-O-methyladenosine-3'-phosphate
  modified_base 11: mod_base = OTHER; note = 2'-O-methyladenosine-3'-phosphate
  modified_base 12: mod_base = OTHER; note = 2'-O-methyladenosine-3'-phosphate
  modified_base 13: mod_base = OTHER; note = 2'-O-methyluridine-3'-phosphate
  modified_base 14: mod_base = OTHER; note = 2'-fluorocytidine-3'-phosphate
  modified_base 15: mod_base = OTHER; note = 2'-O-methyluridine-3'-phosphate
  modified_base 16: mod_base = OTHER; note = 2'-fluorocytidine-3'-phosphate
  modified_base 17: mod_base = OTHER; note = 2'-O-methylguanosine-3'-phosphate
  modified_base 18: mod_base = OTHER; note = 2'-O-methylguanosine-3'-phosphate
  modified_base 19: mod_base = OTHER; note = 2'-O-methylcytidine-3'-phosphate
  modified_base 20: mod_base = OTHER; note = 2'-O-methyluridine-3'-phosphate
  modified_base 21: mod_base = OTHER; note = 2'-O-methylcytidine-3'- phosphorothioate
  modified_base 22: mod_base = OTHER; note = 2'-O-methylcytidine-3'- phosphorothioate
  modified_base 23: mod_base = OTHER; note = 2'-O-methyluridine-3'-phosphate
  misc_feature 1..4: note = RNA
  misc_feature 5: note = DNA
  misc_feature 6..23: note = RNA
tcactgagcaaatctcggctcct

SEQ ID NO: 1092 - DNA, 23 bp, synthetic construct
  source 1..23: mol_type = other DNA
  modified_base 1: mod_base = OTHER; note = Vinyl-phosphonate 2'-O-methyluridine-3'-phosphorothioate
  modified_base 2: mod_base = OTHER; note = 2'-fluoroguanosine-3'-phosphorothioate
  modified_base 3: mod_base = OTHER; note = 2'-O-methylguanosine-3'-phosphate
  modified_base 4: mod_base = OTHER; note = 2'-O-methylcytidine-3'-phosphate
  modified_base 6: mod_base = OTHER; note = 2'-O-methylcytidine-3'-phosphate
  modified_base 7: mod_base = OTHER; note = Thymidine-glycol nucleic acid (GNA) S-Isomer
  modified_base 8: mod_base = OTHER; note = 2'-O-methylguanosine-3'-phosphate
  modified_base 9: mod_base = OTHER; note = 2'-O-methyladenosine-3'-phosphate
  modified_base 10: mod_base = OTHER; note = 2'-O-methylguanosine-3'-phosphate
  modified_base 11: mod_base = OTHER; note = 2'-O-methylcytidine-3'-phosphate
  modified_base 12: mod_base = OTHER; note = 2'-O-methyladenosine-3'-phosphate
  modified_base 13: mod_base = OTHER; note = 2'-O-methyladenosine-3'-phosphate
  modified_base 14: mod_base = OTHER; note = 2'-fluoroadenosine-3'-phosphate
  modified_base 15: mod_base = OTHER; note = 2'-O-methyluridine-3'-phosphate
  modified_base 16: mod_base = OTHER; note = 2'-fluorocytidine-3'-phosphate
  modified_base 17: mod_base = OTHER; note = 2'-O-methyluridine-3'-phosphate
  modified_base 18: mod_base = OTHER; note = 2'-O-methylcytidine-3'-phosphate
  modified_base 19: mod_base = OTHER; note = 2'-O-methylguanosine-3'-phosphate
  modified_base 20: mod_base = OTHER; note = 2'-O-methylguanosine-3'-phosphate
  modified_base 21: mod_base = OTHER; note = 2'-O-methylcytidine-3'- phosphorothioate
  modified_base 22: mod_base = OTHER; note = 2'-O-methyluridine-3'-phosphorothioate
  modified_base 23: mod_base = OTHER; note = 2'-O-methylcytidine-3'-phosphate
  misc_feature 1..4: note = RNA
  misc_feature 5: note = DNA
  misc_feature 6: note = RNA
  misc_feature 7: note = DNA
  misc_feature 8..23: note = RNA
tggcactgagcaaatctcggctc

SEQ ID NO: 1093 - DNA, 23 bp, synthetic construct
  source 1..23: mol_type = other DNA
  modified_base 1: mod_base = OTHER; note = Vinyl-phosphonate 2'-O-methyluridine-3'-phosphorothioate
  modified_base 2: mod_base = OTHER; note = 2'-fluoroguanosine-3'-phosphorothioate
  modified_base 3: mod_base = OTHER; note = 2'-O-methyluridine-3'-phosphate
  modified_base 4: mod_base = OTHER; note = 2'-O-methylguanosine-3'-phosphate
  modified_base 6: mod_base = OTHER; note = 2'-O-methylcytidine-3'-phosphate
  modified_base 7: mod_base = OTHER; note = Adenosine-glycol nucleic acid (GNA) S-Isomer
  modified_base 8: mod_base = OTHER; note = 2'-O-methylcytidine-3'-phosphate
  modified_base 9: mod_base = OTHER; note = 2'-O-methyluridine-3'-phosphate
  modified_base 10: mod_base = OTHER; note = 2'-O-methylguanosine-3'-phosphate
  modified_base 11: mod_base = OTHER; note = 2'-O-methyladenosine-3'-phosphate
  modified_base 12: mod_base = OTHER; note = 2'-O-methylguanosine-3'-phosphate
  modified_base 13: mod_base = OTHER; note = 2'-O-methylcytidine-3'-phosphate
  modified_base 14: mod_base = OTHER; note = 2'-fluoroadenosine-3'-phosphate
  modified_base 15: mod_base = OTHER; note = 2'-O-methyladenosine-3'-phosphate
  modified_base 16: mod_base = OTHER; note = 2'-fluoroadenosine-3'-phosphate
  modified_base 17: mod_base = OTHER; note = 2'-O-methyluridine-3'-phosphate
  modified_base 18: mod_base = OTHER; note = 2'-O-methylcytidine-3'-phosphate
  modified_base 19: mod_base = OTHER; note = 2'-O-methyluridine-3'-phosphate
  modified_base 20: mod_base = OTHER; note = 2'-O-methylcytidine-3'-phosphate
  modified_base 21: mod_base = OTHER; note = 2'-O-methylguanosine-3'- phosphorothioate
  modified_base 22: mod_base = OTHER; note = 2'-O-methylguanosine-3'- phosphorothioate
  modified_base 23: mod_base = OTHER; note = 2'-O-methylcytidine-3'-phosphate
  misc_feature 1..4: note = RNA
  misc_feature 5: note = DNA
  misc_feature 6..23: note = RNA
tgtggcactgagcaaatctcggc

SEQ ID NO: 1094 - DNA, 23 bp, synthetic construct
  source 1..23: mol_type = other DNA
  modified_base 1: mod_base = OTHER; note = Vinyl-phosphonate 2'-O-methyluridine-3'-phosphorothioate
  modified_base 2: mod_base = OTHER; note = 2'-fluoroguanosine-3'-phosphorothioate
  modified_base 3: mod_base = OTHER; note = 2'-O-methylguanosine-3'-phosphate
  modified_base 4: mod_base = OTHER; note = 2'-O-methyladenosine-3'-phosphate
  modified_base 6: mod_base = OTHER; note = 2'-O-methylguanosine-3'-phosphate
  modified_base 7: mod_base = OTHER; note = Thymidine-glycol nucleic acid (GNA) S-Isomer
  modified_base 8: mod_base = OTHER; note = 2'-O-methylguanosine-3'-phosphate
  modified_base 9: mod_base = OTHER; note = 2'-O-methylguanosine-3'-phosphate
  modified_base 10: mod_base = OTHER; note = 2'-O-methylcytidine-3'-phosphate
  modified_base 11: mod_base = OTHER; note = 2'-O-methyladenosine-3'-phosphate
  modified_base 12: mod_base = OTHER; note = 2'-O-methylcytidine-3'-phosphate
  modified_base 13: mod_base = OTHER; note = 2'-O-methyluridine-3'-phosphate
  modified_base 14: mod_base = OTHER; note = 2'-fluoroguanosine-3'-phosphate
  modified_base 15: mod_base = OTHER; note = 2'-O-methyladenosine-3'-phosphate
  modified_base 16: mod_base = OTHER; note = 2'-fluoroguanosine-3'-phosphate
  modified_base 17: mod_base = OTHER; note = 2'-O-methylcytidine-3'-phosphate
  modified_base 18: mod_base = OTHER; note = 2'-O-methyladenosine-3'-phosphate
  modified_base 19: mod_base = OTHER; note = 2'-O-methyladenosine-3'-phosphate
  modified_base 20: mod_base = OTHER; note = 2'-O-methyladenosine-3'-phosphate
  modified_base 21: mod_base = OTHER; note = 2'-O-methyluridine-3'-phosphorothioate
  modified_base 22: mod_base = OTHER; note = 2'-O-methylcytidine-3'- phosphorothioate
  modified_base 23: mod_base = OTHER; note = 2'-O-methyluridine-3'-phosphate
  misc_feature 1..4: note = RNA
  misc_feature 5: note = DNA
  misc_feature 6: note = RNA
  misc_feature 7: note = DNA
  misc_feature 8..23: note = RNA
tggaagtggcactgagcaaatct

SEQ ID NO: 1095 - DNA, 23 bp, synthetic construct
  source 1..23: mol_type = other DNA
  modified_base 1: mod_base = OTHER; note = Vinyl-phosphonate 2'-O-methyluridine-3'-phosphorothioate
  modified_base 2: mod_base = OTHER; note = 2'-fluoroadenosine-3'-phosphorothioate
  modified_base 3: mod_base = OTHER; note = 2'-O-methylguanosine-3'-phosphate
  modified_base 4: mod_base = OTHER; note = 2'-O-methylguanosine-3'-phosphate
  modified_base 6: mod_base = OTHER; note = 2'-O-methyladenosine-3'-phosphate
  modified_base 7: mod_base = OTHER; note = Adenosine-glycol nucleic acid (GNA) S-Isomer
  modified_base 8: mod_base = OTHER; note = 2'-O-methylguanosine-3'-phosphate
  modified_base 9: mod_base = OTHER; note = 2'-O-methyluridine-3'-phosphate
  modified_base 10: mod_base = OTHER; note = 2'-O-methylguanosine-3'-phosphate
  modified_base 11: mod_base = OTHER; note = 2'-O-methylguanosine-3'-phosphate
  modified_base 12: mod_base = OTHER; note = 2'-O-methylcytidine-3'-phosphate
  modified_base 13: mod_base = OTHER; note = 2'-O-methyladenosine-3'-phosphate
  modified_base 14: mod_base = OTHER; note = 2'-fluorocytidine-3'-phosphate
  modified_base 15: mod_base = OTHER; note = 2'-O-methyluridine-3'-phosphate
  modified_base 16: mod_base = OTHER; note = 2'-fluoroguanosine-3'-phosphate
  modified_base 17: mod_base = OTHER; note = 2'-O-methyladenosine-3'-phosphate
  modified_base 18: mod_base = OTHER; note = 2'-O-methylguanosine-3'-phosphate
  modified_base 19: mod_base = OTHER; note = 2'-O-methylcytidine-3'-phosphate
  modified_base 20: mod_base = OTHER; note = 2'-O-methyladenosine-3'-phosphate
  modified_base 21: mod_base = OTHER; note = 2'-O-methyladenosine-3'- phosphorothioate
  modified_base 22: mod_base = OTHER; note = 2'-O-methyladenosine-3'- phosphorothioate
  modified_base 23: mod_base = OTHER; note = 2'-O-methyluridine-3'-phosphate
  misc_feature 1..4: note = RNA
  misc_feature 5: note = DNA
  misc_feature 6..23: note = RNA
tagggaagtggcactgagcaaat

SEQ ID NO: 1096 - RNA, 23 nt, synthetic construct
  source 1..23: mol_type = other RNA
  modified_base 1: mod_base = OTHER; note = Vinyl-phosphonate 2'-O-methyluridine-3'-phosphorothioate
  modified_base 2: mod_base = OTHER; note = 2'-fluoroadenosine-3'-phosphorothioate
  modified_base 3: mod_base = OTHER; note = 2'-O-methylguanosine-3'-phosphate
  modified_base 4: mod_base = OTHER; note = 2'-O-methylguanosine-3'-phosphate
  modified_base 5: mod_base = OTHER; note = 2'-O-methylguanosine-3'-phosphate
  modified_base 6: mod_base = OTHER; note = 2'-fluoroadenosine-3'-phosphate
  modified_base 7: mod_base = OTHER; note = 2'-O-methyladenosine-3'-phosphate
  modified_base 8: mod_base = OTHER; note = 2'-fluoroguanosine-3'-phosphate
  modified_base 9: mod_base = OTHER; note = 2'-fluorouridine-3'-phosphate
  modified_base 10: mod_base = OTHER; note = 2'-O-methylguanosine-3'-phosphate
  modified_base 11: mod_base = OTHER; note = 2'-O-methylguanosine-3'-phosphate
  modified_base 12: mod_base = OTHER; note = 2'-O-methylcytidine-3'-phosphate
  modified_base 13: mod_base = OTHER; note = 2'-O-methyladenosine-3'-phosphate
  modified_base 14: mod_base = OTHER; note = 2'-fluorocytidine-3'-phosphate
  modified_base 15: mod_base = OTHER; note = 2'-O-methyluridine-3'-phosphate
  modified_base 16: mod_base = OTHER; note = 2'-fluoroguanosine-3'-phosphate
  modified_base 17: mod_base = OTHER; note = 2'-O-methyladenosine-3'-phosphate
  modified_base 18: mod_base = OTHER; note = 2'-O-methylguanosine-3'-phosphate
  modified_base 19: mod_base = OTHER; note = 2'-O-methylcytidine-3'-phosphate
  modified_base 20: mod_base = OTHER; note = 2'-O-methyladenosine-3'-phosphate
  modified_base 21: mod_base = OTHER; note = 2'-O-methyladenosine-3'- phosphorothioate
  modified_base 22: mod_base = OTHER; note = 2'-O-methyladenosine-3'- phosphorothioate
  modified_base 23: mod_base = OTHER; note = 2'-O-methyluridine-3'-phosphate
tagggaagtggcactgagcaaat

SEQ ID NO: 1097 - DNA, 23 bp, synthetic construct
  source 1..23: mol_type = other DNA
  modified_base 1: mod_base = OTHER; note = Vinyl-phosphonate 2'-O-methyluridine-3'-phosphorothioate
  modified_base 2: mod_base = OTHER; note = 2'-deoxyadenosine-3'-phosphorothioate
  modified_base 3: mod_base = OTHER; note = 2'-O-methylguanosine-3'-phosphate
  modified_base 4: mod_base = OTHER; note = 2'-O-methylguanosine-3'-phosphate
  modified_base 6: mod_base = OTHER; note = 2'-O-methyladenosine-3'-phosphate
  modified_base 8: mod_base = OTHER; note = 2'-O-methylguanosine-3'-phosphate
  modified_base 9: mod_base = OTHER; note = 2'-O-methyluridine-3'-phosphate
  modified_base 10: mod_base = OTHER; note = 2'-O-methylguanosine-3'-phosphate
  modified_base 11: mod_base = OTHER; note = 2'-O-methylguanosine-3'-phosphate
  modified_base 13: mod_base = OTHER; note = 2'-O-methyladenosine-3'-phosphate
  modified_base 14: mod_base = OTHER; note = 2'-fluorocytidine-3'-phosphate
  modified_base 15: mod_base = OTHER; note = 2'-O-methyluridine-3'-phosphate
  modified_base 16: mod_base = OTHER; note = 2'-O-methylguanosine-3'-phosphate
  modified_base 17: mod_base = OTHER; note = 2'-O-methyladenosine-3'-phosphate
  modified_base 18: mod_base = OTHER; note = 2'-O-methylguanosine-3'-phosphate
  modified_base 19: mod_base = OTHER; note = 2'-O-methylcytidine-3'-phosphate
  modified_base 20: mod_base = OTHER; note = 2'-O-methyladenosine-3'-phosphate
  modified_base 21: mod_base = OTHER; note = 2'-O-methyladenosine-3'- phosphorothioate
  modified_base 22: mod_base = OTHER; note = 2'-O-methyladenosine-3'- phosphorothioate
  modified_base 23: mod_base = OTHER; note = 2'-O-methyluridine-3'-phosphate
  misc_feature 1: note = RNA
  misc_feature 2: note = DNA
  misc_feature 3..4: note = RNA
  misc_feature 5: note = DNA
  misc_feature 6: note = RNA
  misc_feature 7: note = DNA
  misc_feature 8..11: note = RNA
  misc_feature 12: note = DNA
  misc_feature 13..23: note = RNA
tagggaagtggcactgagcaaat

SEQ ID NO: 1098 - DNA, 23 bp, synthetic construct
  source 1..23: mol_type = other DNA
  modified_base 1: mod_base = OTHER; note = Vinyl-phosphonate 2'-O-methyluridine-3'-phosphorothioate
  modified_base 2: mod_base = OTHER; note = 2'-fluoroguanosine-3'-phosphorothioate
  modified_base 3: mod_base = OTHER; note = 2'-O-methyladenosine-3'-phosphate
  modified_base 4: mod_base = OTHER; note = 2'-O-methylguanosine-3'-phosphate
  modified_base 6: mod_base = OTHER; note = 2'-O-methylguanosine-3'-phosphate
  modified_base 7: mod_base = OTHER; note = Adenosine-glycol nucleic acid (GNA) S-Isomer
  modified_base 8: mod_base = OTHER; note = 2'-O-methyladenosine-3'-phosphate
  modified_base 9: mod_base = OTHER; note = 2'-O-methylguanosine-3'-phosphate
  modified_base 10: mod_base = OTHER; note = 2'-O-methyluridine-3'-phosphate
  modified_base 11: mod_base = OTHER; note = 2'-O-methylguanosine-3'-phosphate
  modified_base 12: mod_base = OTHER; note = 2'-O-methylguanosine-3'-phosphate
  modified_base 13: mod_base = OTHER; note = 2'-O-methylcytidine-3'-phosphate
  modified_base 14: mod_base = OTHER; note = 2'-fluoroadenosine-3'-phosphate
  modified_base 15: mod_base = OTHER; note = 2'-O-methylcytidine-3'-phosphate
  modified_base 16: mod_base = OTHER; note = 2'-fluorouridine-3'-phosphate
  modified_base 17: mod_base = OTHER; note = 2'-O-methylguanosine-3'-phosphate
  modified_base 18: mod_base = OTHER; note = 2'-O-methyladenosine-3'-phosphate
  modified_base 19: mod_base = OTHER; note = 2'-O-methylguanosine-3'-phosphate
  modified_base 20: mod_base = OTHER; note = 2'-O-methylcytidine-3'-phosphate
  modified_base 21: mod_base = OTHER; note = 2'-O-methyladenosine-3'- phosphorothioate
  modified_base 22: mod_base = OTHER; note = 2'-O-methyladenosine-3'- phosphorothioate
  modified_base 23: mod_base = OTHER; note = 2'-O-methyladenosine-3'-phosphate
  misc_feature 1..4: note = RNA
  misc_feature 5: note = DNA
  misc_feature 6..23: note = RNA
tgagggaagtggcactgagcaaa

SEQ ID NO: 1099 - RNA, 23 nt, synthetic construct
  source 1..23: mol_type = other RNA
  modified_base 1: mod_base = OTHER; note = Vinyl-phosphonate 2'-O-methyluridine-3'-phosphorothioate
  modified_base 2: mod_base = OTHER; note = 2'-fluoroguanosine-3'-phosphorothioate
  modified_base 3: mod_base = OTHER; note = 2'-O-methyladenosine-3'-phosphate
  modified_base 4: mod_base = OTHER; note = 2'-O-methylguanosine-3'-phosphate
  modified_base 5: mod_base = OTHER; note = 2'-O-methylguanosine-3'-phosphate
  modified_base 6: mod_base = OTHER; note = 2'-fluoroguanosine-3'-phosphate
  modified_base 7: mod_base = OTHER; note = 2'-O-methyladenosine-3'-phosphate
  modified_base 8: mod_base = OTHER; note = 2'-fluoroadenosine-3'-phosphate
  modified_base 9: mod_base = OTHER; note = 2'-fluoroguanosine-3'-phosphate
  modified_base 10: mod_base = OTHER; note = 2'-O-methyluridine-3'-phosphate
  modified_base 11: mod_base = OTHER; note = 2'-O-methylguanosine-3'-phosphate
  modified_base 12: mod_base = OTHER; note = 2'-O-methylguanosine-3'-phosphate
  modified_base 13: mod_base = OTHER; note = 2'-O-methylcytidine-3'-phosphate
  modified_base 14: mod_base = OTHER; note = 2'-fluoroadenosine-3'-phosphate
  modified_base 15: mod_base = OTHER; note = 2'-O-methylcytidine-3'-phosphate
  modified_base 16: mod_base = OTHER; note = 2'-fluorouridine-3'-phosphate
  modified_base 17: mod_base = OTHER; note = 2'-O-methylguanosine-3'-phosphate
  modified_base 18: mod_base = OTHER; note = 2'-O-methyladenosine-3'-phosphate
  modified_base 19: mod_base = OTHER; note = 2'-O-methylguanosine-3'-phosphate
  modified_base 20: mod_base = OTHER; note = 2'-O-methylcytidine-3'-phosphate
  modified_base 21: mod_base = OTHER; note = 2'-O-methyladenosine-3'- phosphorothioate
  modified_base 22: mod_base = OTHER; note = 2'-O-methyladenosine-3'- phosphorothioate
  modified_base 23: mod_base = OTHER; note = 2'-O-methyladenosine-3'-phosphate
tgagggaagtggcactgagcaaa

SEQ ID NO: 1100 - DNA, 23 bp, synthetic construct
  source 1..23: mol_type = other DNA
  modified_base 1: mod_base = OTHER; note = Vinyl-phosphonate 2'-O-methyluridine-3'-phosphorothioate
  modified_base 2: mod_base = OTHER; note = 2'-deoxyguanosine-3'-phosphorothioate
  modified_base 3: mod_base = OTHER; note = 2'-O-methyladenosine-3'-phosphate
  modified_base 4: mod_base = OTHER; note = 2'-O-methylguanosine-3'-phosphate
  modified_base 6: mod_base = OTHER; note = 2'-O-methylguanosine-3'-phosphate
  modified_base 8: mod_base = OTHER; note = 2'-O-methyladenosine-3'-phosphate
  modified_base 9: mod_base = OTHER; note = 2'-O-methylguanosine-3'-phosphate
  modified_base 10: mod_base = OTHER; note = 2'-O-methyluridine-3'-phosphate
  modified_base 11: mod_base = OTHER; note = 2'-O-methylguanosine-3'-phosphate
  modified_base 13: mod_base = OTHER; note = 2'-O-methylcytidine-3'-phosphate
  modified_base 14: mod_base = OTHER; note = 2'-fluoroadenosine-3'-phosphate
  modified_base 15: mod_base = OTHER; note = 2'-O-methylcytidine-3'-phosphate
  modified_base 16: mod_base = OTHER; note = 2'-O-methyluridine-3'-phosphate
  modified_base 17: mod_base = OTHER; note = 2'-O-methylguanosine-3'-phosphate
  modified_base 18: mod_base = OTHER; note = 2'-O-methyladenosine-3'-phosphate
  modified_base 19: mod_base = OTHER; note = 2'-O-methylguanosine-3'-phosphate
  modified_base 20: mod_base = OTHER; note = 2'-O-methylcytidine-3'-phosphate
  modified_base 21: mod_base = OTHER; note = 2'-O-methyladenosine-3'- phosphorothioate
  modified_base 22: mod_base = OTHER; note = 2'-O-methyladenosine-3'- phosphorothioate
  modified_base 23: mod_base = OTHER; note = 2'-O-methyladenosine-3'-phosphate
  misc_feature 1: note = RNA
  misc_feature 2: note = DNA
  misc_feature 3..4: note = RNA
  misc_feature 5: note = DNA
  misc_feature 6: note = RNA
  misc_feature 7: note = DNA
  misc_feature 8..11: note = RNA
  misc_feature 12: note = DNA
  misc_feature 13..23: note = RNA
tgagggaagtggcactgagcaaa

SEQ ID NO: 1101 - RNA, 23 nt, synthetic construct
  source 1..23: mol_type = other RNA
  modified_base 1: mod_base = OTHER; note = Vinyl-phosphonate 2'-O-methyluridine-3'-phosphorothioate
  modified_base 2: mod_base = OTHER; note = 2'-fluorouridine -3'-phosphorothioate
  modified_base 3: mod_base = OTHER; note = 2'-O-methyladenosine-3'-phosphate
  modified_base 4: mod_base = OTHER; note = 2'-O-methylguanosine-3'-phosphate
  modified_base 5: mod_base = OTHER; note = 2'-O-methyladenosine-3'-phosphate
  modified_base 6: mod_base = OTHER; note = 2'-fluoroadenosine-3'-phosphate
  modified_base 7: mod_base = OTHER; note = 2'-O-methylguanosine-3'-phosphate
  modified_base 8: mod_base = OTHER; note = 2'-fluoroadenosine-3'-phosphate
  modified_base 9: mod_base = OTHER; note = 2'-fluoroguanosine-3'-phosphate
  modified_base 10: mod_base = OTHER; note = 2'-O-methylguanosine-3'-phosphate
  modified_base 11: mod_base = OTHER; note = 2'-O-methylguanosine-3'-phosphate
  modified_base 12: mod_base = OTHER; note = 2'-O-methyladenosine-3'-phosphate
  modified_base 13: mod_base = OTHER; note = 2'-O-methyladenosine-3'-phosphate
  modified_base 14: mod_base = OTHER; note = 2'-fluoroguanosine-3'-phosphate
  modified_base 15: mod_base = OTHER; note = 2'-O-methyluridine-3'-phosphate
  modified_base 16: mod_base = OTHER; note = 2'-fluoroguanosine-3'-phosphate
  modified_base 17: mod_base = OTHER; note = 2'-O-methylguanosine-3'-phosphate
  modified_base 18: mod_base = OTHER; note = 2'-O-methylcytidine-3'-phosphate
  modified_base 19: mod_base = OTHER; note = 2'-O-methyladenosine-3'-phosphate
  modified_base 20: mod_base = OTHER; note = 2'-O-methylcytidine-3'-phosphate
  modified_base 21: mod_base = OTHER; note = 2'-O-methyluridine-3'-phosphorothioate
  modified_base 22: mod_base = OTHER; note = 2'-O-methylguanosine-3'- phosphorothioate
  modified_base 23: mod_base = OTHER; note = 2'-O-methyladenosine-3'-phosphate
ttagaagagggaagtggcactga

SEQ ID NO: 1102 - DNA, 23 bp, synthetic construct
  source 1..23: mol_type = other DNA
  modified_base 1: mod_base = OTHER; note = Vinyl-phosphonate 2'-O-methyluridine-3'-phosphorothioate
  modified_base 2: mod_base = OTHER; note = 2'-deoxythymidine-3'-phosphorothioate
  modified_base 3: mod_base = OTHER; note = 2'-O-methyladenosine-3'-phosphate
  modified_base 4: mod_base = OTHER; note = 2'-O-methylguanosine-3'-phosphate
  modified_base 6: mod_base = OTHER; note = 2'-O-methyladenosine-3'-phosphate
  modified_base 8: mod_base = OTHER; note = 2'-O-methyladenosine-3'-phosphate
  modified_base 9: mod_base = OTHER; note = 2'-O-methylguanosine-3'-phosphate
  modified_base 10: mod_base = OTHER; note = 2'-O-methylguanosine-3'-phosphate
  modified_base 11: mod_base = OTHER; note = 2'-O-methylguanosine-3'-phosphate
  modified_base 13: mod_base = OTHER; note = 2'-O-methyladenosine-3'-phosphate
  modified_base 14: mod_base = OTHER; note = 2'-fluoroguanosine-3'-phosphate
  modified_base 15: mod_base = OTHER; note = 2'-O-methyluridine-3'-phosphate
  modified_base 16: mod_base = OTHER; note = 2'-O-methylguanosine-3'-phosphate
  modified_base 17: mod_base = OTHER; note = 2'-O-methylguanosine-3'-phosphate
  modified_base 18: mod_base = OTHER; note = 2'-O-methylcytidine-3'-phosphate
  modified_base 19: mod_base = OTHER; note = 2'-O-methyladenosine-3'-phosphate
  modified_base 20: mod_base = OTHER; note = 2'-O-methylcytidine-3'-phosphate
  modified_base 21: mod_base = OTHER; note = 2'-O-methyluridine-3'-phosphorothioate
  modified_base 22: mod_base = OTHER; note = 2'-O-methylguanosine-3'- phosphorothioate
  modified_base 23: mod_base = OTHER; note = 2'-O-methyladenosine-3'-phosphate
  misc_feature 1: note = RNA
  misc_feature 2: note = DNA
  misc_feature 3..4: note = RNA
  misc_feature 5: note = DNA
  misc_feature 6: note = RNA
  misc_feature 7: note = DNA
  misc_feature 8..11: note = RNA
  misc_feature 12: note = DNA
  misc_feature 13..23: note = RNA
ttagaagagggaagtggcactga

SEQ ID NO: 1103 - RNA, 23 nt, synthetic construct
  source 1..23: mol_type = other RNA
  modified_base 1: mod_base = OTHER; note = Vinyl-phosphonate 2'-O-methyluridine-3'-phosphorothioate
  modified_base 2: mod_base = OTHER; note = 2'-fluoroguanosine-3'-phosphorothioate
  modified_base 3: mod_base = OTHER; note = 2'-O-methyladenosine-3'-phosphate
  modified_base 4: mod_base = OTHER; note = 2'-O-methylcytidine-3'-phosphate
  modified_base 5: mod_base = OTHER; note = 2'-O-methyluridine-3'-phosphate
  modified_base 6: mod_base = OTHER; note = 2'-fluoroadenosine-3'-phosphate
  modified_base 7: mod_base = OTHER; note = 2'-O-methylguanosine-3'-phosphate
  modified_base 8: mod_base = OTHER; note = 2'-fluoroadenosine-3'-phosphate
  modified_base 9: mod_base = OTHER; note = 2'-fluoroadenosine-3'-phosphate
  modified_base 10: mod_base = OTHER; note = 2'-O-methylguanosine-3'-phosphate
  modified_base 11: mod_base = OTHER; note = 2'-O-methyladenosine-3'-phosphate
  modified_base 12: mod_base = OTHER; note = 2'-O-methylguanosine-3'-phosphate
  modified_base 13: mod_base = OTHER; note = 2'-O-methylguanosine-3'-phosphate
  modified_base 14: mod_base = OTHER; note = 2'-fluoroguanosine-3'-phosphate
  modified_base 15: mod_base = OTHER; note = 2'-O-methyladenosine-3'-phosphate
  modified_base 16: mod_base = OTHER; note = 2'-fluoroadenosine-3'-phosphate
  modified_base 17: mod_base = OTHER; note = 2'-O-methylguanosine-3'-phosphate
  modified_base 18: mod_base = OTHER; note = 2'-O-methyluridine-3'-phosphate
  modified_base 19: mod_base = OTHER; note = 2'-O-methylguanosine-3'-phosphate
  modified_base 20: mod_base = OTHER; note = 2'-O-methylguanosine-3'-phosphate
  modified_base 21: mod_base = OTHER; note = 2'-O-methylcytidine-3'- phosphorothioate
  modified_base 22: mod_base = OTHER; note = 2'-O-methyladenosine-3'- phosphorothioate
  modified_base 23: mod_base = OTHER; note = 2'-O-methylcytidine-3'-phosphate
tgactagaagagggaagtggcac

SEQ ID NO: 1104 - DNA, 23 bp, synthetic construct
  source 1..23: mol_type = other DNA
  modified_base 1: mod_base = OTHER; note = Vinyl-phosphonate 2'-O-methyluridine-3'-phosphorothioate
  modified_base 2: mod_base = OTHER; note = 2'-deoxyguanosine-3'-phosphorothioate
  modified_base 3: mod_base = OTHER; note = 2'-O-methyladenosine-3'-phosphate
  modified_base 4: mod_base = OTHER; note = 2'-O-methylcytidine-3'-phosphate
  modified_base 6: mod_base = OTHER; note = 2'-O-methyladenosine-3'-phosphate
  modified_base 8: mod_base = OTHER; note = 2'-O-methyladenosine-3'-phosphate
  modified_base 9: mod_base = OTHER; note = 2'-O-methyladenosine-3'-phosphate
  modified_base 10: mod_base = OTHER; note = 2'-O-methylguanosine-3'-phosphate
  modified_base 11: mod_base = OTHER; note = 2'-O-methyladenosine-3'-phosphate
  modified_base 13: mod_base = OTHER; note = 2'-O-methylguanosine-3'-phosphate
  modified_base 14: mod_base = OTHER; note = 2'-fluoroguanosine-3'-phosphate
  modified_base 15: mod_base = OTHER; note = 2'-O-methyladenosine-3'-phosphate
  modified_base 16: mod_base = OTHER; note = 2'-O-methyladenosine-3'-phosphate
  modified_base 17: mod_base = OTHER; note = 2'-O-methylguanosine-3'-phosphate
  modified_base 18: mod_base = OTHER; note = 2'-O-methyluridine-3'-phosphate
  modified_base 19: mod_base = OTHER; note = 2'-O-methylguanosine-3'-phosphate
  modified_base 20: mod_base = OTHER; note = 2'-O-methylguanosine-3'-phosphate
  modified_base 21: mod_base = OTHER; note = 2'-O-methylcytidine-3'- phosphorothioate
  modified_base 22: mod_base = OTHER; note = 2'-O-methyladenosine-3'- phosphorothioate
  modified_base 23: mod_base = OTHER; note = 2'-O-methylcytidine-3'-phosphate
  misc_feature 1: note = RNA
  misc_feature 2: note = DNA
  misc_feature 3..4: note = RNA
  misc_feature 5: note = DNA
  misc_feature 6: note = RNA
  misc_feature 7: note = DNA
  misc_feature 8..11: note = RNA
  misc_feature 12: note = DNA
  misc_feature 13..23: note = RNA
tgactagaagagggaagtggcac

SEQ ID NO: 1105 - DNA, 23 bp, synthetic construct
  source 1..23: mol_type = other DNA
  modified_base 1: mod_base = OTHER; note = Vinyl-phosphonate 2'-O-methyluridine-3'-phosphorothioate
  modified_base 2: mod_base = OTHER; note = 2'-fluoroadenosine-3'-phosphorothioate
  modified_base 3: mod_base = OTHER; note = 2'-O-methylguanosine-3'-phosphate
  modified_base 4: mod_base = OTHER; note = 2'-O-methyladenosine-3'-phosphate
  modified_base 6: mod_base = OTHER; note = 2'-O-methyluridine-3'-phosphate
  modified_base 7: mod_base = OTHER; note = Adenosine-glycol nucleic acid (GNA) S-Isomer
  modified_base 8: mod_base = OTHER; note = 2'-O-methylguanosine-3'-phosphate
  modified_base 9: mod_base = OTHER; note = 2'-O-methyladenosine-3'-phosphate
  modified_base 10: mod_base = OTHER; note = 2'-O-methyladenosine-3'-phosphate
  modified_base 11: mod_base = OTHER; note = 2'-O-methylguanosine-3'-phosphate
  modified_base 12: mod_base = OTHER; note = 2'-O-methyladenosine-3'-phosphate
  modified_base 13: mod_base = OTHER; note = 2'-O-methylguanosine-3'-phosphate
  modified_base 14: mod_base = OTHER; note = 2'-fluoroguanosine-3'-phosphate
  modified_base 15: mod_base = OTHER; note = 2'-O-methylguanosine-3'-phosphate
  modified_base 16: mod_base = OTHER; note = 2'-fluoroadenosine-3'-phosphate
  modified_base 17: mod_base = OTHER; note = 2'-O-methyladenosine-3'-phosphate
  modified_base 18: mod_base = OTHER; note = 2'-O-methylguanosine-3'-phosphate
  modified_base 19: mod_base = OTHER; note = 2'-O-methyluridine-3'-phosphate
  modified_base 20: mod_base = OTHER; note = 2'-O-methylguanosine-3'-phosphate
  modified_base 21: mod_base = OTHER; note = 2'-O-methylguanosine-3'- phosphorothioate
  modified_base 22: mod_base = OTHER; note = 2'-O-methylcytidine-3'- phosphorothioate
  modified_base 23: mod_base = OTHER; note = 2'-O-methyladenosine-3'-phosphate
  misc_feature 1..4: note = RNA
  misc_feature 5: note = DNA
  misc_feature 6..23: note = RNA
tagactagaagagggaagtggca

SEQ ID NO: 1106 - RNA, 23 nt, synthetic construct
  source 1..23: mol_type = other RNA
  modified_base 1: mod_base = OTHER; note = Vinyl-phosphonate 2'-O-methyluridine-3'-phosphorothioate
  modified_base 2: mod_base = OTHER; note = 2'-fluoroadenosine-3'-phosphorothioate
  modified_base 3: mod_base = OTHER; note = 2'-O-methylguanosine-3'-phosphate
  modified_base 4: mod_base = OTHER; note = 2'-O-methyladenosine-3'-phosphate
  modified_base 5: mod_base = OTHER; note = 2'-O-methylcytidine-3'-phosphate
  modified_base 6: mod_base = OTHER; note = 2'-fluorouridine-3'-phosphate
  modified_base 7: mod_base = OTHER; note = 2'-O-methyladenosine-3'-phosphate
  modified_base 8: mod_base = OTHER; note = 2'-fluoroguanosine-3'-phosphate
  modified_base 9: mod_base = OTHER; note = 2'-fluoroadenosine-3'-phosphate
  modified_base 10: mod_base = OTHER; note = 2'-O-methyladenosine-3'-phosphate
  modified_base 11: mod_base = OTHER; note = 2'-O-methylguanosine-3'-phosphate
  modified_base 12: mod_base = OTHER; note = 2'-O-methyladenosine-3'-phosphate
  modified_base 13: mod_base = OTHER; note = 2'-O-methylguanosine-3'-phosphate
  modified_base 14: mod_base = OTHER; note = 2'-fluoroguanosine-3'-phosphate
  modified_base 15: mod_base = OTHER; note = 2'-O-methylguanosine-3'-phosphate
  modified_base 16: mod_base = OTHER; note = 2'-fluoroadenosine-3'-phosphate
  modified_base 17: mod_base = OTHER; note = 2'-O-methyladenosine-3'-phosphate
  modified_base 18: mod_base = OTHER; note = 2'-O-methylguanosine-3'-phosphate
  modified_base 19: mod_base = OTHER; note = 2'-O-methyluridine-3'-phosphate
  modified_base 20: mod_base = OTHER; note = 2'-O-methylguanosine-3'-phosphate
  modified_base 21: mod_base = OTHER; note = 2'-O-methylguanosine-3'- phosphorothioate
  modified_base 22: mod_base = OTHER; note = 2'-O-methylcytidine-3'- phosphorothioate
  modified_base 23: mod_base = OTHER; note = 2'-O-methyladenosine-3'-phosphate
tagactagaagagggaagtggca

SEQ ID NO: 1107 - DNA, 23 bp, synthetic construct
  source 1..23: mol_type = other DNA
  modified_base 1: mod_base = OTHER; note = Vinyl-phosphonate 2'-O-methyluridine-3'-phosphorothioate
  modified_base 2: mod_base = OTHER; note = 2'-deoxyadenosine-3'-phosphorothioate
  modified_base 3: mod_base = OTHER; note = 2'-O-methylguanosine-3'-phosphate
  modified_base 4: mod_base = OTHER; note = 2'-O-methyladenosine-3'-phosphate
  modified_base 6: mod_base = OTHER; note = 2'-O-methyluridine-3'-phosphate
  modified_base 8: mod_base = OTHER; note = 2'-O-methylguanosine-3'-phosphate
  modified_base 9: mod_base = OTHER; note = 2'-O-methyladenosine-3'-phosphate
  modified_base 10: mod_base = OTHER; note = 2'-O-methyladenosine-3'-phosphate
  modified_base 11: mod_base = OTHER; note = 2'-O-methylguanosine-3'-phosphate
  modified_base 13: mod_base = OTHER; note = 2'-O-methylguanosine-3'-phosphate
  modified_base 14: mod_base = OTHER; note = 2'-fluoroguanosine-3'-phosphate
  modified_base 15: mod_base = OTHER; note = 2'-O-methylguanosine-3'-phosphate
  modified_base 16: mod_base = OTHER; note = 2'-O-methyladenosine-3'-phosphate
  modified_base 17: mod_base = OTHER; note = 2'-O-methyladenosine-3'-phosphate
  modified_base 18: mod_base = OTHER; note = 2'-O-methylguanosine-3'-phosphate
  modified_base 19: mod_base = OTHER; note = 2'-O-methyluridine-3'-phosphate
  modified_base 20: mod_base = OTHER; note = 2'-O-methylguanosine-3'-phosphate
  modified_base 21: mod_base = OTHER; note = 2'-O-methylguanosine-3'- phosphorothioate
  modified_base 22: mod_base = OTHER; note = 2'-O-methylcytidine-3'- phosphorothioate
  modified_base 23: mod_base = OTHER; note = 2'-O-methyladenosine-3'-phosphate
  misc_feature 1: note = RNA
  misc_feature 2: note = DNA
  misc_feature 3..4: note = RNA
  misc_feature 5: note = DNA
  misc_feature 6: note = RNA
  misc_feature 7: note = DNA
  misc_feature 8..11: note = RNA
  misc_feature 12: note = DNA
  misc_feature 13..23: note = RNA
tagactagaagagggaagtggca

SEQ ID NO: 1108 - DNA, 23 bp, synthetic construct
  source 1..23: mol_type = other DNA
  modified_base 1: mod_base = OTHER; note = Vinyl-phosphonate 2'-O-methyluridine-3'-phosphorothioate
  modified_base 2: mod_base = OTHER; note = 2'-fluorocytidine-3'-phosphorothioate
  modified_base 3: mod_base = OTHER; note = 2'-O-methyladenosine-3'-phosphate
  modified_base 4: mod_base = OTHER; note = 2'-O-methylguanosine-3'-phosphate
  modified_base 6: mod_base = OTHER; note = 2'-O-methylcytidine-3'-phosphate
  modified_base 7: mod_base = OTHER; note = Thymidine-glycol nucleic acid (GNA) S-Isomer
  modified_base 8: mod_base = OTHER; note = 2'-O-methyladenosine-3'-phosphate
  modified_base 9: mod_base = OTHER; note = 2'-O-methylguanosine-3'-phosphate
  modified_base 10: mod_base = OTHER; note = 2'-O-methyladenosine-3'-phosphate
  modified_base 11: mod_base = OTHER; note = 2'-O-methyladenosine-3'-phosphate
  modified_base 12: mod_base = OTHER; note = 2'-O-methylguanosine-3'-phosphate
  modified_base 13: mod_base = OTHER; note = 2'-O-methyladenosine-3'-phosphate
  modified_base 14: mod_base = OTHER; note = 2'-fluoroguanosine-3'-phosphate
  modified_base 15: mod_base = OTHER; note = 2'-O-methylguanosine-3'-phosphate
  modified_base 16: mod_base = OTHER; note = 2'-fluoroguanosine-3'-phosphate
  modified_base 17: mod_base = OTHER; note = 2'-O-methyladenosine-3'-phosphate
  modified_base 18: mod_base = OTHER; note = 2'-O-methyladenosine-3'-phosphate
  modified_base 19: mod_base = OTHER; note = 2'-O-methylguanosine-3'-phosphate
  modified_base 20: mod_base = OTHER; note = 2'-O-methyluridine-3'-phosphate
  modified_base 21: mod_base = OTHER; note = 2'-O-methylguanosine-3'- phosphorothioate
  modified_base 22: mod_base = OTHER; note = 2'-O-methylguanosine-3'- phosphorothioate
  modified_base 23: mod_base = OTHER; note = 2'-O-methylcytidine-3'-phosphate
  misc_feature 1..4: note = RNA
  misc_feature 5: note = DNA
  misc_feature 6: note = RNA
  misc_feature 7: note = DNA
  misc_feature 8..23: note = RNA
tcagactagaagagggaagtggc

SEQ ID NO: 1109 - RNA, 23 nt, synthetic construct
  source 1..23: mol_type = other RNA
  modified_base 1: mod_base = OTHER; note = Vinyl-phosphonate 2'-O-methyluridine-3'-phosphorothioate
  modified_base 2: mod_base = OTHER; note = 2'-fluorocytidine-3'-phosphorothioate
  modified_base 3: mod_base = OTHER; note = 2'-O-methyladenosine-3'-phosphate
  modified_base 4: mod_base = OTHER; note = 2'-O-methylguanosine-3'-phosphate
  modified_base 5: mod_base = OTHER; note = 2'-O-methyladenosine-3'-phosphate
  modified_base 6: mod_base = OTHER; note = 2'-fluorocytidine-3'-phosphate
  modified_base 7: mod_base = OTHER; note = 2'-O-methyluridine-3'-phosphate
  modified_base 8: mod_base = OTHER; note = 2'-fluoroadenosine-3'-phosphate
  modified_base 9: mod_base = OTHER; note = 2'-fluoroguanosine-3'-phosphate
  modified_base 10: mod_base = OTHER; note = 2'-O-methyladenosine-3'-phosphate
  modified_base 11: mod_base = OTHER; note = 2'-O-methyladenosine-3'-phosphate
  modified_base 12: mod_base = OTHER; note = 2'-O-methylguanosine-3'-phosphate
  modified_base 13: mod_base = OTHER; note = 2'-O-methyladenosine-3'-phosphate
  modified_base 14: mod_base = OTHER; note = 2'-fluoroguanosine-3'-phosphate
  modified_base 15: mod_base = OTHER; note = 2'-O-methylguanosine-3'-phosphate
  modified_base 16: mod_base = OTHER; note = 2'-fluoroguanosine-3'-phosphate
  modified_base 17: mod_base = OTHER; note = 2'-O-methyladenosine-3'-phosphate
  modified_base 18: mod_base = OTHER; note = 2'-O-methyladenosine-3'-phosphate
  modified_base 19: mod_base = OTHER; note = 2'-O-methylguanosine-3'-phosphate
  modified_base 20: mod_base = OTHER; note = 2'-O-methyluridine-3'-phosphate
  modified_base 21: mod_base = OTHER; note = 2'-O-methylguanosine-3'- phosphorothioate
  modified_base 22: mod_base = OTHER; note = 2'-O-methylguanosine-3'- phosphorothioate
  modified_base 23: mod_base = OTHER; note = 2'-O-methylcytidine-3'-phosphate
tcagactagaagagggaagtggc

SEQ ID NO: 1110 - DNA, 23 bp, synthetic construct
  source 1..23: mol_type = other DNA
  modified_base 1: mod_base = OTHER; note = Vinyl-phosphonate 2'-O-methyluridine-3'-phosphorothioate
  modified_base 2: mod_base = OTHER; note = 2'-deoxycytidine-3'-phosphorothioate
  modified_base 3: mod_base = OTHER; note = 2'-O-methyladenosine-3'-phosphate
  modified_base 4: mod_base = OTHER; note = 2'-O-methylguanosine-3'-phosphate
  modified_base 6: mod_base = OTHER; note = 2'-O-methylcytidine-3'-phosphate
  modified_base 8: mod_base = OTHER; note = 2'-O-methyladenosine-3'-phosphate
  modified_base 9: mod_base = OTHER; note = 2'-O-methylguanosine-3'-phosphate
  modified_base 10: mod_base = OTHER; note = 2'-O-methyladenosine-3'-phosphate
  modified_base 11: mod_base = OTHER; note = 2'-O-methyladenosine-3'-phosphate
  modified_base 13: mod_base = OTHER; note = 2'-O-methyladenosine-3'-phosphate
  modified_base 14: mod_base = OTHER; note = 2'-fluoroguanosine-3'-phosphate
  modified_base 15: mod_base = OTHER; note = 2'-O-methylguanosine-3'-phosphate
  modified_base 16: mod_base = OTHER; note = 2'-O-methylguanosine-3'-phosphate
  modified_base 17: mod_base = OTHER; note = 2'-O-methyladenosine-3'-phosphate
  modified_base 18: mod_base = OTHER; note = 2'-O-methyladenosine-3'-phosphate
  modified_base 19: mod_base = OTHER; note = 2'-O-methylguanosine-3'-phosphate
  modified_base 20: mod_base = OTHER; note = 2'-O-methyluridine-3'-phosphate
  modified_base 21: mod_base = OTHER; note = 2'-O-methylguanosine-3'- phosphorothioate
  modified_base 22: mod_base = OTHER; note = 2'-O-methylguanosine-3'- phosphorothioate
  modified_base 23: mod_base = OTHER; note = 2'-O-methylcytidine-3'-phosphate
  misc_feature 1: note = RNA
  misc_feature 2: note = DNA
  misc_feature 3..4: note = RNA
  misc_feature 5: note = DNA
  misc_feature 6: note = RNA
  misc_feature 7: note = DNA
  misc_feature 8..11: note = RNA
  misc_feature 12: note = DNA
  misc_feature 13..23: note = RNA
tcagactagaagagggaagtggc

SEQ ID NO: 1111 - RNA, 23 nt, synthetic construct
  source 1..23: mol_type = other RNA
  modified_base 1: mod_base = OTHER; note = Vinyl-phosphonate 2'-O-methyluridine-3'-phosphorothioate
  modified_base 2: mod_base = OTHER; note = 2'-fluorouridine -3'-phosphorothioate
  modified_base 3: mod_base = OTHER; note = 2'-O-methylcytidine-3'-phosphate
  modified_base 4: mod_base = OTHER; note = 2'-O-methyladenosine-3'-phosphate
  modified_base 5: mod_base = OTHER; note = 2'-O-methylguanosine-3'-phosphate
  modified_base 6: mod_base = OTHER; note = 2'-fluoroadenosine-3'-phosphate
  modified_base 7: mod_base = OTHER; note = 2'-O-methylcytidine-3'-phosphate
  modified_base 8: mod_base = OTHER; note = 2'-fluorouridine-3'-phosphate
  modified_base 9: mod_base = OTHER; note = 2'-fluoroadenosine-3'-phosphate
  modified_base 10: mod_base = OTHER; note = 2'-O-methylguanosine-3'-phosphate
  modified_base 11: mod_base = OTHER; note = 2'-O-methyladenosine-3'-phosphate
  modified_base 12: mod_base = OTHER; note = 2'-O-methyladenosine-3'-phosphate
  modified_base 13: mod_base = OTHER; note = 2'-O-methylguanosine-3'-phosphate
  modified_base 14: mod_base = OTHER; note = 2'-fluoroadenosine-3'-phosphate
  modified_base 15: mod_base = OTHER; note = 2'-O-methylguanosine-3'-phosphate
  modified_base 16: mod_base = OTHER; note = 2'-fluoroguanosine-3'-phosphate
  modified_base 17: mod_base = OTHER; note = 2'-O-methylguanosine-3'-phosphate
  modified_base 18: mod_base = OTHER; note = 2'-O-methyladenosine-3'-phosphate
  modified_base 19: mod_base = OTHER; note = 2'-O-methyladenosine-3'-phosphate
  modified_base 20: mod_base = OTHER; note = 2'-O-methylguanosine-3'-phosphate
  modified_base 21: mod_base = OTHER; note = 2'-O-methyluridine-3'-phosphorothioate
  modified_base 22: mod_base = OTHER; note = 2'-O-methylguanosine-3'- phosphorothioate
  modified_base 23: mod_base = OTHER; note = 2'-O-methylguanosine-3'-phosphate
ttcagactagaagagggaagtgg

SEQ ID NO: 1112 - DNA, 23 bp, synthetic construct
  source 1..23: mol_type = other DNA
  modified_base 1: mod_base = OTHER; note = Vinyl-phosphonate 2'-O-methyluridine-3'-phosphorothioate
  modified_base 2: mod_base = OTHER; note = 2'-fluorocytidine-3'-phosphorothioate
  modified_base 3: mod_base = OTHER; note = 2'-O-methyluridine-3'-phosphate
  modified_base 4: mod_base = OTHER; note = 2'-O-methylcytidine-3'-phosphate
  modified_base 6: mod_base = OTHER; note = 2'-O-methylguanosine-3'-phosphate
  modified_base 7: mod_base = OTHER; note = Adenosine-glycol nucleic acid (GNA) S-Isomer
  modified_base 8: mod_base = OTHER; note = 2'-O-methylcytidine-3'-phosphate
  modified_base 9: mod_base = OTHER; note = 2'-O-methyluridine-3'-phosphate
  modified_base 10: mod_base = OTHER; note = 2'-O-methyladenosine-3'-phosphate
  modified_base 11: mod_base = OTHER; note = 2'-O-methylguanosine-3'-phosphate
  modified_base 12: mod_base = OTHER; note = 2'-O-methyladenosine-3'-phosphate
  modified_base 13: mod_base = OTHER; note = 2'-O-methyladenosine-3'-phosphate
  modified_base 14: mod_base = OTHER; note = 2'-fluoroguanosine-3'-phosphate
  modified_base 15: mod_base = OTHER; note = 2'-O-methyladenosine-3'-phosphate
  modified_base 16: mod_base = OTHER; note = 2'-fluoroguanosine-3'-phosphate
  modified_base 17: mod_base = OTHER; note = 2'-O-methylguanosine-3'-phosphate
  modified_base 18: mod_base = OTHER; note = 2'-O-methylguanosine-3'-phosphate
  modified_base 19: mod_base = OTHER; note = 2'-O-methyladenosine-3'-phosphate
  modified_base 20: mod_base = OTHER; note = 2'-O-methyladenosine-3'-phosphate
  modified_base 21: mod_base = OTHER; note = 2'-O-methylguanosine-3'- phosphorothioate
  modified_base 22: mod_base = OTHER; note = 2'-O-methyluridine-3'-phosphorothioate
  modified_base 23: mod_base = OTHER; note = 2'-O-methylguanosine-3'-phosphate
  misc_feature 1..4: note = RNA
  misc_feature 5: note = DNA
  misc_feature 6..23: note = RNA
tctcagactagaagagggaagtg

SEQ ID NO: 1113 - RNA, 23 nt, synthetic construct
  source 1..23: mol_type = other RNA
  modified_base 1: mod_base = OTHER; note = Vinyl-phosphonate 2'-O-methyluridine-3'-phosphorothioate
  modified_base 2: mod_base = OTHER; note = 2'-fluorocytidine-3'-phosphorothioate
  modified_base 3: mod_base = OTHER; note = 2'-O-methyluridine-3'-phosphate
  modified_base 4: mod_base = OTHER; note = 2'-O-methylcytidine-3'-phosphate
  modified_base 5: mod_base = OTHER; note = 2'-O-methyladenosine-3'-phosphate
  modified_base 6: mod_base = OTHER; note = 2'-fluoroguanosine-3'-phosphate
  modified_base 7: mod_base = OTHER; note = 2'-O-methyladenosine-3'-phosphate
  modified_base 8: mod_base = OTHER; note = 2'-fluorocytidine-3'-phosphate
  modified_base 9: mod_base = OTHER; note = 2'-fluorouridine-3'-phosphate
  modified_base 10: mod_base = OTHER; note = 2'-O-methyladenosine-3'-phosphate
  modified_base 11: mod_base = OTHER; note = 2'-O-methylguanosine-3'-phosphate
  modified_base 12: mod_base = OTHER; note = 2'-O-methyladenosine-3'-phosphate
  modified_base 13: mod_base = OTHER; note = 2'-O-methyladenosine-3'-phosphate
  modified_base 14: mod_base = OTHER; note = 2'-fluoroguanosine-3'-phosphate
  modified_base 15: mod_base = OTHER; note = 2'-O-methyladenosine-3'-phosphate
  modified_base 16: mod_base = OTHER; note = 2'-fluoroguanosine-3'-phosphate
  modified_base 17: mod_base = OTHER; note = 2'-O-methylguanosine-3'-phosphate
  modified_base 18: mod_base = OTHER; note = 2'-O-methylguanosine-3'-phosphate
  modified_base 19: mod_base = OTHER; note = 2'-O-methyladenosine-3'-phosphate
  modified_base 20: mod_base = OTHER; note = 2'-O-methyladenosine-3'-phosphate
  modified_base 21: mod_base = OTHER; note = 2'-O-methylguanosine-3'- phosphorothioate
  modified_base 22: mod_base = OTHER; note = 2'-O-methyluridine-3'-phosphorothioate
  modified_base 23: mod_base = OTHER; note = 2'-O-methylguanosine-3'-phosphate
tctcagactagaagagggaagtg

SEQ ID NO: 1114 - DNA, 23 bp, synthetic construct
  source 1..23: mol_type = other DNA
  modified_base 1: mod_base = OTHER; note = Vinyl-phosphonate 2'-O-methyluridine-3'-phosphorothioate
  modified_base 2: mod_base = OTHER; note = 2'-deoxycytidine-3'-phosphorothioate
  modified_base 3: mod_base = OTHER; note = 2'-O-methyluridine-3'-phosphate
  modified_base 4: mod_base = OTHER; note = 2'-O-methylcytidine-3'-phosphate
  modified_base 6: mod_base = OTHER; note = 2'-O-methylguanosine-3'-phosphate
  modified_base 8: mod_base = OTHER; note = 2'-O-methylcytidine-3'-phosphate
  modified_base 9: mod_base = OTHER; note = 2'-O-methyluridine-3'-phosphate
  modified_base 10: mod_base = OTHER; note = 2'-O-methyladenosine-3'-phosphate
  modified_base 11: mod_base = OTHER; note = 2'-O-methylguanosine-3'-phosphate
  modified_base 13: mod_base = OTHER; note = 2'-O-methyladenosine-3'-phosphate
  modified_base 14: mod_base = OTHER; note = 2'-fluoroguanosine-3'-phosphate
  modified_base 15: mod_base = OTHER; note = 2'-O-methyladenosine-3'-phosphate
  modified_base 16: mod_base = OTHER; note = 2'-O-methylguanosine-3'-phosphate
  modified_base 17: mod_base = OTHER; note = 2'-O-methylguanosine-3'-phosphate
  modified_base 18: mod_base = OTHER; note = 2'-O-methylguanosine-3'-phosphate
  modified_base 19: mod_base = OTHER; note = 2'-O-methyladenosine-3'-phosphate
  modified_base 20: mod_base = OTHER; note = 2'-O-methyladenosine-3'-phosphate
  modified_base 21: mod_base = OTHER; note = 2'-O-methylguanosine-3'- phosphorothioate
  modified_base 22: mod_base = OTHER; note = 2'-O-methyluridine-3'-phosphorothioate
  modified_base 23: mod_base = OTHER; note = 2'-O-methylguanosine-3'-phosphate
  misc_feature 1: note = RNA
  misc_feature 2: note = DNA
  misc_feature 3..4: note = RNA
  misc_feature 5: note = DNA
  misc_feature 6: note = RNA
  misc_feature 7: note = DNA
  misc_feature 8..11: note = RNA
  misc_feature 12: note = DNA
  misc_feature 13..23: note = RNA
tctcagactagaagagggaagtg

SEQ ID NO: 1115 - DNA, 23 bp, synthetic construct
  source 1..23: mol_type = other DNA
  modified_base 1: mod_base = OTHER; note = Vinyl-phosphonate 2'-O-methyluridine-3'-phosphorothioate
  modified_base 2: mod_base = OTHER; note = 2'-fluorocytidine-3'-phosphorothioate
  modified_base 3: mod_base = OTHER; note = 2'-O-methyluridine-3'-phosphate
  modified_base 4: mod_base = OTHER; note = 2'-O-methylcytidine-3'-phosphate
  modified_base 6: mod_base = OTHER; note = 2'-O-methylcytidine-3'-phosphate
  modified_base 7: mod_base = OTHER; note = Adenosine-glycol nucleic acid (GNA) S-Isomer
  modified_base 8: mod_base = OTHER; note = 2'-O-methylguanosine-3'-phosphate
  modified_base 9: mod_base = OTHER; note = 2'-O-methyladenosine-3'-phosphate
  modified_base 10: mod_base = OTHER; note = 2'-O-methylcytidine-3'-phosphate
  modified_base 11: mod_base = OTHER; note = 2'-O-methyluridine-3'-phosphate
  modified_base 12: mod_base = OTHER; note = 2'-O-methyladenosine-3'-phosphate
  modified_base 13: mod_base = OTHER; note = 2'-O-methylguanosine-3'-phosphate
  modified_base 14: mod_base = OTHER; note = 2'-fluoroadenosine-3'-phosphate
  modified_base 15: mod_base = OTHER; note = 2'-O-methyladenosine-3'-phosphate
  modified_base 16: mod_base = OTHER; note = 2'-fluoroguanosine-3'-phosphate
  modified_base 17: mod_base = OTHER; note = 2'-O-methyladenosine-3'-phosphate
  modified_base 18: mod_base = OTHER; note = 2'-O-methylguanosine-3'-phosphate
  modified_base 19: mod_base = OTHER; note = 2'-O-methylguanosine-3'-phosphate
  modified_base 20: mod_base = OTHER; note = 2'-O-methylguanosine-3'-phosphate
  modified_base 21: mod_base = OTHER; note = 2'-O-methyladenosine-3'- phosphorothioate
  modified_base 22: mod_base = OTHER; note = 2'-O-methyladenosine-3'- phosphorothioate
  modified_base 23: mod_base = OTHER; note = 2'-O-methylguanosine-3'-phosphate
  misc_feature 1..4: note = RNA
  misc_feature 5: note = DNA
  misc_feature 6..23: note = RNA
tctctcagactagaagagggaag

SEQ ID NO: 1116 - DNA, 23 bp, synthetic construct
  source 1..23: mol_type = other DNA
  modified_base 1: mod_base = OTHER; note = Vinyl-phosphonate 2'-O-methyluridine-3'-phosphorothioate
  modified_base 2: mod_base = OTHER; note = 2'-fluorocytidine-3'-phosphorothioate
  modified_base 3: mod_base = OTHER; note = 2'-O-methylcytidine-3'-phosphate
  modified_base 4: mod_base = OTHER; note = 2'-O-methylcytidine-3'-phosphate
  modified_base 6: mod_base = OTHER; note = 2'-O-methylcytidine-3'-phosphate
  modified_base 7: mod_base = OTHER; note = Thymidine-glycol nucleic acid (GNA) S-Isomer
  modified_base 8: mod_base = OTHER; note = 2'-O-methylcytidine-3'-phosphate
  modified_base 9: mod_base = OTHER; note = 2'-O-methyladenosine-3'-phosphate
  modified_base 10: mod_base = OTHER; note = 2'-O-methylguanosine-3'-phosphate
  modified_base 11: mod_base = OTHER; note = 2'-O-methyladenosine-3'-phosphate
  modified_base 12: mod_base = OTHER; note = 2'-O-methylcytidine-3'-phosphate
  modified_base 13: mod_base = OTHER; note = 2'-O-methyluridine-3'-phosphate
  modified_base 14: mod_base = OTHER; note = 2'-fluoroadenosine-3'-phosphate
  modified_base 15: mod_base = OTHER; note = 2'-O-methylguanosine-3'-phosphate
  modified_base 16: mod_base = OTHER; note = 2'-fluoroadenosine-3'-phosphate
  modified_base 17: mod_base = OTHER; note = 2'-O-methyladenosine-3'-phosphate
  modified_base 18: mod_base = OTHER; note = 2'-O-methylguanosine-3'-phosphate
  modified_base 19: mod_base = OTHER; note = 2'-O-methyladenosine-3'-phosphate
  modified_base 20: mod_base = OTHER; note = 2'-O-methylguanosine-3'-phosphate
  modified_base 21: mod_base = OTHER; note = 2'-O-methylguanosine-3'- phosphorothioate
  modified_base 22: mod_base = OTHER; note = 2'-O-methylguanosine-3'- phosphorothioate
  modified_base 23: mod_base = OTHER; note = 2'-O-methyladenosine-3'-phosphate
  misc_feature 1..4: note = RNA
  misc_feature 5: note = DNA
  misc_feature 6: note = RNA
  misc_feature 7: note = DNA
  misc_feature 8..23: note = RNA
tccctctcagactagaagaggga

SEQ ID NO: 1117 - RNA, 23 nt, synthetic construct
  source 1..23: mol_type = other RNA
  modified_base 1: mod_base = OTHER; note = Vinyl-phosphonate 2'-O-methyluridine-3'-phosphorothioate
  modified_base 2: mod_base = OTHER; note = 2'-fluorocytidine-3'-phosphorothioate
  modified_base 3: mod_base = OTHER; note = 2'-O-methylcytidine-3'-phosphate
  modified_base 4: mod_base = OTHER; note = 2'-O-methylcytidine-3'-phosphate
  modified_base 5: mod_base = OTHER; note = 2'-O-methyluridine-3'-phosphate
  modified_base 6: mod_base = OTHER; note = 2'-fluorocytidine-3'-phosphate
  modified_base 7: mod_base = OTHER; note = 2'-O-methyluridine-3'-phosphate
  modified_base 8: mod_base = OTHER; note = 2'-fluorocytidine-3'-phosphate
  modified_base 9: mod_base = OTHER; note = 2'-fluoroadenosine-3'-phosphate
  modified_base 10: mod_base = OTHER; note = 2'-O-methylguanosine-3'-phosphate
  modified_base 11: mod_base = OTHER; note = 2'-O-methyladenosine-3'-phosphate
  modified_base 12: mod_base = OTHER; note = 2'-O-methylcytidine-3'-phosphate
  modified_base 13: mod_base = OTHER; note = 2'-O-methyluridine-3'-phosphate
  modified_base 14: mod_base = OTHER; note = 2'-fluoroadenosine-3'-phosphate
  modified_base 15: mod_base = OTHER; note = 2'-O-methylguanosine-3'-phosphate
  modified_base 16: mod_base = OTHER; note = 2'-fluoroadenosine-3'-phosphate
  modified_base 17: mod_base = OTHER; note = 2'-O-methyladenosine-3'-phosphate
  modified_base 18: mod_base = OTHER; note = 2'-O-methylguanosine-3'-phosphate
  modified_base 19: mod_base = OTHER; note = 2'-O-methyladenosine-3'-phosphate
  modified_base 20: mod_base = OTHER; note = 2'-O-methylguanosine-3'-phosphate
  modified_base 21: mod_base = OTHER; note = 2'-O-methylguanosine-3'- phosphorothioate
  modified_base 22: mod_base = OTHER; note = 2'-O-methylguanosine-3'- phosphorothioate
  modified_base 23: mod_base = OTHER; note = 2'-O-methyladenosine-3'-phosphate
tccctctcagactagaagaggga

SEQ ID NO: 1118 - DNA, 23 bp, synthetic construct
  source 1..23: mol_type = other DNA
  modified_base 1: mod_base = OTHER; note = Vinyl-phosphonate 2'-O-methyluridine-3'-phosphorothioate
  modified_base 2: mod_base = OTHER; note = 2'-deoxycytidine-3'-phosphorothioate
  modified_base 3: mod_base = OTHER; note = 2'-O-methylcytidine-3'-phosphate
  modified_base 4: mod_base = OTHER; note = 2'-O-methylcytidine-3'-phosphate
  modified_base 6: mod_base = OTHER; note = 2'-O-methylcytidine-3'-phosphate
  modified_base 8: mod_base = OTHER; note = 2'-O-methylcytidine-3'-phosphate
  modified_base 9: mod_base = OTHER; note = 2'-O-methyladenosine-3'-phosphate
  modified_base 10: mod_base = OTHER; note = 2'-O-methylguanosine-3'-phosphate
  modified_base 11: mod_base = OTHER; note = 2'-O-methyladenosine-3'-phosphate
  modified_base 13: mod_base = OTHER; note = 2'-O-methyluridine-3'-phosphate
  modified_base 14: mod_base = OTHER; note = 2'-fluoroadenosine-3'-phosphate
  modified_base 15: mod_base = OTHER; note = 2'-O-methylguanosine-3'-phosphate
  modified_base 16: mod_base = OTHER; note = 2'-O-methyladenosine-3'-phosphate
  modified_base 17: mod_base = OTHER; note = 2'-O-methyladenosine-3'-phosphate
  modified_base 18: mod_base = OTHER; note = 2'-O-methylguanosine-3'-phosphate
  modified_base 19: mod_base = OTHER; note = 2'-O-methyladenosine-3'-phosphate
  modified_base 20: mod_base = OTHER; note = 2'-O-methylguanosine-3'-phosphate
  modified_base 21: mod_base = OTHER; note = 2'-O-methylguanosine-3'- phosphorothioate
  modified_base 22: mod_base = OTHER; note = 2'-O-methylguanosine-3'- phosphorothioate
  modified_base 23: mod_base = OTHER; note = 2'-O-methyladenosine-3'-phosphate
  misc_feature 1: note = RNA
  misc_feature 2: note = DNA
  misc_feature 3..4: note = RNA
  misc_feature 5: note = DNA
  misc_feature 6: note = RNA
  misc_feature 7: note = DNA
  misc_feature 8..11: note = RNA
  misc_feature 12: note = DNA
  misc_feature 13..23: note = RNA
tccctctcagactagaagaggga

SEQ ID NO: 1119 - DNA, 23 bp, synthetic construct
  source 1..23: mol_type = other DNA
  modified_base 1: mod_base = OTHER; note = Vinyl-phosphonate 2'-O-methyluridine-3'-phosphorothioate
  modified_base 2: mod_base = OTHER; note = 2'-fluorouridine -3'-phosphorothioate
  modified_base 3: mod_base = OTHER; note = 2'-O-methyluridine-3'-phosphate
  modified_base 4: mod_base = OTHER; note = 2'-O-methylcytidine-3'-phosphate
  modified_base 6: mod_base = OTHER; note = 2'-O-methylcytidine-3'-phosphate
  modified_base 7: mod_base = OTHER; note = Thymidine-glycol nucleic acid (GNA) S-Isomer
  modified_base 8: mod_base = OTHER; note = 2'-O-methylcytidine-3'-phosphate
  modified_base 9: mod_base = OTHER; note = 2'-O-methyluridine-3'-phosphate
  modified_base 10: mod_base = OTHER; note = 2'-O-methylcytidine-3'-phosphate
  modified_base 11: mod_base = OTHER; note = 2'-O-methyladenosine-3'-phosphate
  modified_base 12: mod_base = OTHER; note = 2'-O-methylguanosine-3'-phosphate
  modified_base 13: mod_base = OTHER; note = 2'-O-methyladenosine-3'-phosphate
  modified_base 14: mod_base = OTHER; note = 2'-fluorocytidine-3'-phosphate
  modified_base 15: mod_base = OTHER; note = 2'-O-methyluridine-3'-phosphate
  modified_base 16: mod_base = OTHER; note = 2'-fluoroadenosine-3'-phosphate
  modified_base 17: mod_base = OTHER; note = 2'-O-methylguanosine-3'-phosphate
  modified_base 18: mod_base = OTHER; note = 2'-O-methyladenosine-3'-phosphate
  modified_base 19: mod_base = OTHER; note = 2'-O-methyladenosine-3'-phosphate
  modified_base 20: mod_base = OTHER; note = 2'-O-methylguanosine-3'-phosphate
  modified_base 21: mod_base = OTHER; note = 2'-O-methyladenosine-3'- phosphorothioate
  modified_base 22: mod_base = OTHER; note = 2'-O-methylguanosine-3'- phosphorothioate
  modified_base 23: mod_base = OTHER; note = 2'-O-methylguanosine-3'-phosphate
  misc_feature 1..4: note = RNA
  misc_feature 5: note = DNA
  misc_feature 6: note = RNA
  misc_feature 7: note = DNA
  misc_feature 8..23: note = RNA
tttccctctcagactagaagagg

SEQ ID NO: 1120 - RNA, 23 nt, synthetic construct
  source 1..23: mol_type = other RNA
  modified_base 1: mod_base = OTHER; note = Vinyl-phosphonate 2'-O-methyluridine-3'-phosphorothioate
  modified_base 2: mod_base = OTHER; note = 2'-fluorocytidine-3'-phosphorothioate
  modified_base 3: mod_base = OTHER; note = 2'-O-methyluridine-3'-phosphate
  modified_base 4: mod_base = OTHER; note = 2'-O-methyluridine-3'-phosphate
  modified_base 5: mod_base = OTHER; note = 2'-O-methylcytidine-3'-phosphate
  modified_base 6: mod_base = OTHER; note = 2'-fluorocytidine-3'-phosphate
  modified_base 7: mod_base = OTHER; note = 2'-O-methylcytidine-3'-phosphate
  modified_base 8: mod_base = OTHER; note = 2'-fluorouridine-3'-phosphate
  modified_base 9: mod_base = OTHER; note = 2'-fluorocytidine-3'-phosphate
  modified_base 10: mod_base = OTHER; note = 2'-O-methyluridine-3'-phosphate
  modified_base 11: mod_base = OTHER; note = 2'-O-methylcytidine-3'-phosphate
  modified_base 12: mod_base = OTHER; note = 2'-O-methyladenosine-3'-phosphate
  modified_base 13: mod_base = OTHER; note = 2'-O-methylguanosine-3'-phosphate
  modified_base 14: mod_base = OTHER; note = 2'-fluoroadenosine-3'-phosphate
  modified_base 15: mod_base = OTHER; note = 2'-O-methylcytidine-3'-phosphate
  modified_base 16: mod_base = OTHER; note = 2'-fluorouridine-3'-phosphate
  modified_base 17: mod_base = OTHER; note = 2'-O-methyladenosine-3'-phosphate
  modified_base 18: mod_base = OTHER; note = 2'-O-methylguanosine-3'-phosphate
  modified_base 19: mod_base = OTHER; note = 2'-O-methyladenosine-3'-phosphate
  modified_base 20: mod_base = OTHER; note = 2'-O-methyladenosine-3'-phosphate
  modified_base 21: mod_base = OTHER; note = 2'-O-methylguanosine-3'- phosphorothioate
  modified_base 22: mod_base = OTHER; note = 2'-O-methyladenosine-3'- phosphorothioate
  modified_base 23: mod_base = OTHER; note = 2'-O-methylguanosine-3'-phosphate
tcttccctctcagactagaagag

SEQ ID NO: 1121 - DNA, 23 bp, synthetic construct
  source 1..23: mol_type = other DNA
  modified_base 1: mod_base = OTHER; note = Vinyl-phosphonate 2'-O-methyluridine-3'-phosphorothioate
  modified_base 2: mod_base = OTHER; note = 2'-deoxycytidine-3'-phosphorothioate
  modified_base 3: mod_base = OTHER; note = 2'-O-methyluridine-3'-phosphate
  modified_base 4: mod_base = OTHER; note = 2'-O-methyluridine-3'-phosphate
  modified_base 6: mod_base = OTHER; note = 2'-O-methylcytidine-3'-phosphate
  modified_base 8: mod_base = OTHER; note = 2'-O-methyluridine-3'-phosphate
  modified_base 9: mod_base = OTHER; note = 2'-O-methylcytidine-3'-phosphate
  modified_base 10: mod_base = OTHER; note = 2'-O-methyluridine-3'-phosphate
  modified_base 11: mod_base = OTHER; note = 2'-O-methylcytidine-3'-phosphate
  modified_base 13: mod_base = OTHER; note = 2'-O-methylguanosine-3'-phosphate
  modified_base 14: mod_base = OTHER; note = 2'-fluoroadenosine-3'-phosphate
  modified_base 15: mod_base = OTHER; note = 2'-O-methylcytidine-3'-phosphate
  modified_base 16: mod_base = OTHER; note = 2'-O-methyluridine-3'-phosphate
  modified_base 17: mod_base = OTHER; note = 2'-O-methyladenosine-3'-phosphate
  modified_base 18: mod_base = OTHER; note = 2'-O-methylguanosine-3'-phosphate
  modified_base 19: mod_base = OTHER; note = 2'-O-methyladenosine-3'-phosphate
  modified_base 20: mod_base = OTHER; note = 2'-O-methyladenosine-3'-phosphate
  modified_base 21: mod_base = OTHER; note = 2'-O-methylguanosine-3'- phosphorothioate
  modified_base 22: mod_base = OTHER; note = 2'-O-methyladenosine-3'- phosphorothioate
  modified_base 23: mod_base = OTHER; note = 2'-O-methylguanosine-3'-phosphate
  misc_feature 1: note = RNA
  misc_feature 2: note = DNA
  misc_feature 3..4: note = RNA
  misc_feature 5: note = DNA
  misc_feature 6: note = RNA
  misc_feature 7: note = DNA
  misc_feature 8..11: note = RNA
  misc_feature 12: note = DNA
  misc_feature 13..23: note = RNA
tcttccctctcagactagaagag

SEQ ID NO: 1122 - RNA, 23 nt, synthetic construct
  source 1..23: mol_type = other RNA
  modified_base 1: mod_base = OTHER; note = Vinyl-phosphonate 2'-O-methyluridine-3'-phosphorothioate
  modified_base 2: mod_base = OTHER; note = 2'-fluorocytidine-3'-phosphorothioate
  modified_base 3: mod_base = OTHER; note = 2'-O-methyluridine-3'-phosphate
  modified_base 4: mod_base = OTHER; note = 2'-O-methylcytidine-3'-phosphate
  modified_base 5: mod_base = OTHER; note = 2'-O-methyluridine-3'-phosphate
  modified_base 6: mod_base = OTHER; note = 2'-fluorouridine-3'-phosphate
  modified_base 7: mod_base = OTHER; note = 2'-O-methylcytidine-3'-phosphate
  modified_base 8: mod_base = OTHER; note = 2'-fluorocytidine-3'-phosphate
  modified_base 9: mod_base = OTHER; note = 2'-fluorocytidine-3'-phosphate
  modified_base 10: mod_base = OTHER; note = 2'-O-methyluridine-3'-phosphate
  modified_base 11: mod_base = OTHER; note = 2'-O-methylcytidine-3'-phosphate
  modified_base 12: mod_base = OTHER; note = 2'-O-methyluridine-3'-phosphate
  modified_base 13: mod_base = OTHER; note = 2'-O-methylcytidine-3'-phosphate
  modified_base 14: mod_base = OTHER; note = 2'-fluoroadenosine-3'-phosphate
  modified_base 15: mod_base = OTHER; note = 2'-O-methylguanosine-3'-phosphate
  modified_base 16: mod_base = OTHER; note = 2'-fluoroadenosine-3'-phosphate
  modified_base 17: mod_base = OTHER; note = 2'-O-methylcytidine-3'-phosphate
  modified_base 18: mod_base = OTHER; note = 2'-O-methyluridine-3'-phosphate
  modified_base 19: mod_base = OTHER; note = 2'-O-methyladenosine-3'-phosphate
  modified_base 20: mod_base = OTHER; note = 2'-O-methylguanosine-3'-phosphate
  modified_base 21: mod_base = OTHER; note = 2'-O-methyladenosine-3'- phosphorothioate
  modified_base 22: mod_base = OTHER; note = 2'-O-methyladenosine-3'- phosphorothioate
  modified_base 23: mod_base = OTHER; note = 2'-O-methylguanosine-3'-phosphate
tctcttccctctcagactagaag

SEQ ID NO: 1123 - DNA, 23 bp, synthetic construct
  source 1..23: mol_type = other DNA
  modified_base 1: mod_base = OTHER; note = Vinyl-phosphonate 2'-O-methyluridine-3'-phosphorothioate
  modified_base 2: mod_base = OTHER; note = 2'-deoxycytidine-3'-phosphorothioate
  modified_base 3: mod_base = OTHER; note = 2'-O-methyluridine-3'-phosphate
  modified_base 4: mod_base = OTHER; note = 2'-O-methylcytidine-3'-phosphate
  modified_base 6: mod_base = OTHER; note = 2'-O-methyluridine-3'-phosphate
  modified_base 8: mod_base = OTHER; note = 2'-O-methylcytidine-3'-phosphate
  modified_base 9: mod_base = OTHER; note = 2'-O-methylcytidine-3'-phosphate
  modified_base 10: mod_base = OTHER; note = 2'-O-methyluridine-3'-phosphate
  modified_base 11: mod_base = OTHER; note = 2'-O-methylcytidine-3'-phosphate
  modified_base 13: mod_base = OTHER; note = 2'-O-methylcytidine-3'-phosphate
  modified_base 14: mod_base = OTHER; note = 2'-fluoroadenosine-3'-phosphate
  modified_base 15: mod_base = OTHER; note = 2'-O-methylguanosine-3'-phosphate
  modified_base 16: mod_base = OTHER; note = 2'-O-methyladenosine-3'-phosphate
  modified_base 17: mod_base = OTHER; note = 2'-O-methylcytidine-3'-phosphate
  modified_base 18: mod_base = OTHER; note = 2'-O-methyluridine-3'-phosphate
  modified_base 19: mod_base = OTHER; note = 2'-O-methyladenosine-3'-phosphate
  modified_base 20: mod_base = OTHER; note = 2'-O-methylguanosine-3'-phosphate
  modified_base 21: mod_base = OTHER; note = 2'-O-methyladenosine-3'- phosphorothioate
  modified_base 22: mod_base = OTHER; note = 2'-O-methyladenosine-3'- phosphorothioate
  modified_base 23: mod_base = OTHER; note = 2'-O-methylguanosine-3'-phosphate
  misc_feature 1: note = RNA
  misc_feature 2: note = DNA
  misc_feature 3..4: note = RNA
  misc_feature 5: note = DNA
  misc_feature 6: note = RNA
  misc_feature 7: note = DNA
  misc_feature 8..11: note = RNA
  misc_feature 12: note = DNA
  misc_feature 13..23: note = RNA
tctcttccctctcagactagaag

SEQ ID NO: 1124 - DNA, 23 bp, synthetic construct
  source 1..23: mol_type = other DNA
  modified_base 1: mod_base = OTHER; note = Vinyl-phosphonate 2'-O-methyluridine-3'-phosphorothioate
  modified_base 2: mod_base = OTHER; note = 2'-fluorocytidine-3'-phosphorothioate
  modified_base 3: mod_base = OTHER; note = 2'-O-methylcytidine-3'-phosphate
  modified_base 4: mod_base = OTHER; note = 2'-O-methyluridine-3'-phosphate
  modified_base 6: mod_base = OTHER; note = 2'-O-methyluridine-3'-phosphate
  modified_base 7: mod_base = OTHER; note = Thymidine-glycol nucleic acid (GNA) S-Isomer
  modified_base 8: mod_base = OTHER; note = 2'-O-methylcytidine-3'-phosphate
  modified_base 9: mod_base = OTHER; note = 2'-O-methylcytidine-3'-phosphate
  modified_base 10: mod_base = OTHER; note = 2'-O-methylcytidine-3'-phosphate
  modified_base 11: mod_base = OTHER; note = 2'-O-methyluridine-3'-phosphate
  modified_base 12: mod_base = OTHER; note = 2'-O-methylcytidine-3'-phosphate
  modified_base 13: mod_base = OTHER; note = 2'-O-methyluridine-3'-phosphate
  modified_base 14: mod_base = OTHER; note = 2'-fluorocytidine-3'-phosphate
  modified_base 15: mod_base = OTHER; note = 2'-O-methyladenosine-3'-phosphate
  modified_base 16: mod_base = OTHER; note = 2'-fluoroguanosine-3'-phosphate
  modified_base 17: mod_base = OTHER; note = 2'-O-methyladenosine-3'-phosphate
  modified_base 18: mod_base = OTHER; note = 2'-O-methylcytidine-3'-phosphate
  modified_base 19: mod_base = OTHER; note = 2'-O-methyluridine-3'-phosphate
  modified_base 20: mod_base = OTHER; note = 2'-O-methyladenosine-3'-phosphate
  modified_base 21: mod_base = OTHER; note = 2'-O-methylguanosine-3'- phosphorothioate
  modified_base 22: mod_base = OTHER; note = 2'-O-methyladenosine-3'- phosphorothioate
  modified_base 23: mod_base = OTHER; note = 2'-O-methyladenosine-3'-phosphate
  misc_feature 1..4: note = RNA
  misc_feature 5: note = DNA
  misc_feature 6: note = RNA
  misc_feature 7: note = DNA
  misc_feature 8..23: note = RNA
tcctcttccctctcagactagaa

SEQ ID NO: 1125 - RNA, 23 nt, synthetic construct
  source 1..23: mol_type = other RNA
  modified_base 1: mod_base = OTHER; note = Vinyl-phosphonate 2'-O-methyluridine-3'-phosphorothioate
  modified_base 2: mod_base = OTHER; note = 2'-fluorocytidine-3'-phosphorothioate
  modified_base 3: mod_base = OTHER; note = 2'-O-methylcytidine-3'-phosphate
  modified_base 4: mod_base = OTHER; note = 2'-O-methyluridine-3'-phosphate
  modified_base 5: mod_base = OTHER; note = 2'-O-methylcytidine-3'-phosphate
  modified_base 6: mod_base = OTHER; note = 2'-fluorouridine-3'-phosphate
  modified_base 7: mod_base = OTHER; note = 2'-O-methyluridine-3'-phosphate
  modified_base 8: mod_base = OTHER; note = 2'-fluorocytidine-3'-phosphate
  modified_base 9: mod_base = OTHER; note = 2'-fluorocytidine-3'-phosphate
  modified_base 10: mod_base = OTHER; note = 2'-O-methylcytidine-3'-phosphate
  modified_base 11: mod_base = OTHER; note = 2'-O-methyluridine-3'-phosphate
  modified_base 12: mod_base = OTHER; note = 2'-O-methylcytidine-3'-phosphate
  modified_base 13: mod_base = OTHER; note = 2'-O-methyluridine-3'-phosphate
  modified_base 14: mod_base = OTHER; note = 2'-fluorocytidine-3'-phosphate
  modified_base 15: mod_base = OTHER; note = 2'-O-methyladenosine-3'-phosphate
  modified_base 16: mod_base = OTHER; note = 2'-fluoroguanosine-3'-phosphate
  modified_base 17: mod_base = OTHER; note = 2'-O-methyladenosine-3'-phosphate
  modified_base 18: mod_base = OTHER; note = 2'-O-methylcytidine-3'-phosphate
  modified_base 19: mod_base = OTHER; note = 2'-O-methyluridine-3'-phosphate
  modified_base 20: mod_base = OTHER; note = 2'-O-methyladenosine-3'-phosphate
  modified_base 21: mod_base = OTHER; note = 2'-O-methylguanosine-3'- phosphorothioate
  modified_base 22: mod_base = OTHER; note = 2'-O-methyladenosine-3'- phosphorothioate
  modified_base 23: mod_base = OTHER; note = 2'-O-methyladenosine-3'-phosphate
tcctcttccctctcagactagaa

SEQ ID NO: 1126 - DNA, 23 bp, synthetic construct
  source 1..23: mol_type = other DNA
  modified_base 1: mod_base = OTHER; note = Vinyl-phosphonate 2'-O-methyluridine-3'-phosphorothioate
  modified_base 2: mod_base = OTHER; note = 2'-deoxycytidine-3'-phosphorothioate
  modified_base 3: mod_base = OTHER; note = 2'-O-methylcytidine-3'-phosphate
  modified_base 4: mod_base = OTHER; note = 2'-O-methyluridine-3'-phosphate
  modified_base 6: mod_base = OTHER; note = 2'-O-methyluridine-3'-phosphate
  modified_base 8: mod_base = OTHER; note = 2'-O-methylcytidine-3'-phosphate
  modified_base 9: mod_base = OTHER; note = 2'-O-methylcytidine-3'-phosphate
  modified_base 10: mod_base = OTHER; note = 2'-O-methylcytidine-3'-phosphate
  modified_base 11: mod_base = OTHER; note = 2'-O-methyluridine-3'-phosphate
  modified_base 13: mod_base = OTHER; note = 2'-O-methyluridine-3'-phosphate
  modified_base 14: mod_base = OTHER; note = 2'-fluorocytidine-3'-phosphate
  modified_base 15: mod_base = OTHER; note = 2'-O-methyladenosine-3'-phosphate
  modified_base 16: mod_base = OTHER; note = 2'-O-methylguanosine-3'-phosphate
  modified_base 17: mod_base = OTHER; note = 2'-O-methyladenosine-3'-phosphate
  modified_base 18: mod_base = OTHER; note = 2'-O-methylcytidine-3'-phosphate
  modified_base 19: mod_base = OTHER; note = 2'-O-methyluridine-3'-phosphate
  modified_base 20: mod_base = OTHER; note = 2'-O-methyladenosine-3'-phosphate
  modified_base 21: mod_base = OTHER; note = 2'-O-methylguanosine-3'- phosphorothioate
  modified_base 22: mod_base = OTHER; note = 2'-O-methyladenosine-3'- phosphorothioate
  modified_base 23: mod_base = OTHER; note = 2'-O-methyladenosine-3'-phosphate
  misc_feature 1: note = RNA
  misc_feature 2: note = DNA
  misc_feature 3..4: note = RNA
  misc_feature 5: note = DNA
  misc_feature 6: note = RNA
  misc_feature 7: note = DNA
  misc_feature 8..11: note = RNA
  misc_feature 12: note = DNA
  misc_feature 13..23: note = RNA
tcctcttccctctcagactagaa

SEQ ID NO: 1127 - DNA, 23 bp, synthetic construct
  source 1..23: mol_type = other DNA
  modified_base 1: mod_base = OTHER; note = Vinyl-phosphonate 2'-O-methyluridine-3'-phosphorothioate
  modified_base 2: mod_base = OTHER; note = 2'-fluorocytidine-3'-phosphorothioate
  modified_base 3: mod_base = OTHER; note = 2'-O-methylcytidine-3'-phosphate
  modified_base 4: mod_base = OTHER; note = 2'-O-methylcytidine-3'-phosphate
  modified_base 6: mod_base = OTHER; note = 2'-O-methylcytidine-3'-phosphate
  modified_base 7: mod_base = OTHER; note = Thymidine-glycol nucleic acid (GNA) S-Isomer
  modified_base 8: mod_base = OTHER; note = 2'-O-methyluridine-3'-phosphate
  modified_base 9: mod_base = OTHER; note = 2'-O-methylcytidine-3'-phosphate
  modified_base 10: mod_base = OTHER; note = 2'-O-methylcytidine-3'-phosphate
  modified_base 11: mod_base = OTHER; note = 2'-O-methylcytidine-3'-phosphate
  modified_base 12: mod_base = OTHER; note = 2'-O-methyluridine-3'-phosphate
  modified_base 13: mod_base = OTHER; note = 2'-O-methylcytidine-3'-phosphate
  modified_base 14: mod_base = OTHER; note = 2'-fluorouridine-3'-phosphate
  modified_base 15: mod_base = OTHER; note = 2'-O-methylcytidine-3'-phosphate
  modified_base 16: mod_base = OTHER; note = 2'-fluoroadenosine-3'-phosphate
  modified_base 17: mod_base = OTHER; note = 2'-O-methylguanosine-3'-phosphate
  modified_base 18: mod_base = OTHER; note = 2'-O-methyladenosine-3'-phosphate
  modified_base 19: mod_base = OTHER; note = 2'-O-methylcytidine-3'-phosphate
  modified_base 20: mod_base = OTHER; note = 2'-O-methyluridine-3'-phosphate
  modified_base 21: mod_base = OTHER; note = 2'-O-methyladenosine-3'- phosphorothioate
  modified_base 22: mod_base = OTHER; note = 2'-O-methylguanosine-3'- phosphorothioate
  modified_base 23: mod_base = OTHER; note = 2'-O-methyladenosine-3'-phosphate
  misc_feature 1..4: note = RNA
  misc_feature 5: note = DNA
  misc_feature 6: note = RNA
  misc_feature 7: note = DNA
  misc_feature 8..23: note = RNA
tccctcttccctctcagactaga

SEQ ID NO: 1128 - RNA, 23 nt, synthetic construct
  source 1..23: mol_type = other RNA
  modified_base 1: mod_base = OTHER; note = Vinyl-phosphonate 2'-O-methyluridine-3'-phosphorothioate
  modified_base 2: mod_base = OTHER; note = 2'-fluorocytidine-3'-phosphorothioate
  modified_base 3: mod_base = OTHER; note = 2'-O-methylcytidine-3'-phosphate
  modified_base 4: mod_base = OTHER; note = 2'-O-methylcytidine-3'-phosphate
  modified_base 5: mod_base = OTHER; note = 2'-O-methyluridine-3'-phosphate
  modified_base 6: mod_base = OTHER; note = 2'-fluorocytidine-3'-phosphate
  modified_base 7: mod_base = OTHER; note = 2'-O-methyluridine-3'-phosphate
  modified_base 8: mod_base = OTHER; note = 2'-fluorouridine-3'-phosphate
  modified_base 9: mod_base = OTHER; note = 2'-fluorocytidine-3'-phosphate
  modified_base 10: mod_base = OTHER; note = 2'-O-methylcytidine-3'-phosphate
  modified_base 11: mod_base = OTHER; note = 2'-O-methylcytidine-3'-phosphate
  modified_base 12: mod_base = OTHER; note = 2'-O-methyluridine-3'-phosphate
  modified_base 13: mod_base = OTHER; note = 2'-O-methylcytidine-3'-phosphate
  modified_base 14: mod_base = OTHER; note = 2'-fluorouridine-3'-phosphate
  modified_base 15: mod_base = OTHER; note = 2'-O-methylcytidine-3'-phosphate
  modified_base 16: mod_base = OTHER; note = 2'-fluoroadenosine-3'-phosphate
  modified_base 17: mod_base = OTHER; note = 2'-O-methylguanosine-3'-phosphate
  modified_base 18: mod_base = OTHER; note = 2'-O-methyladenosine-3'-phosphate
  modified_base 19: mod_base = OTHER; note = 2'-O-methylcytidine-3'-phosphate
  modified_base 20: mod_base = OTHER; note = 2'-O-methyluridine-3'-phosphate
  modified_base 21: mod_base = OTHER; note = 2'-O-methyladenosine-3'- phosphorothioate
  modified_base 22: mod_base = OTHER; note = 2'-O-methylguanosine-3'- phosphorothioate
  modified_base 23: mod_base = OTHER; note = 2'-O-methyladenosine-3'-phosphate
tccctcttccctctcagactaga

SEQ ID NO: 1129 - DNA, 23 bp, synthetic construct
  source 1..23: mol_type = other DNA
  modified_base 1: mod_base = OTHER; note = Vinyl-phosphonate 2'-O-methyluridine-3'-phosphorothioate
  modified_base 2: mod_base = OTHER; note = 2'-fluoroadenosine-3'-phosphorothioate
  modified_base 3: mod_base = OTHER; note = 2'-O-methylguanosine-3'-phosphate
  modified_base 4: mod_base = OTHER; note = 2'-O-methylcytidine-3'-phosphate
  modified_base 6: mod_base = OTHER; note = 2'-O-methylcytidine-3'-phosphate
  modified_base 7: mod_base = OTHER; note = Thymidine-glycol nucleic acid (GNA) S-Isomer
  modified_base 8: mod_base = OTHER; note = 2'-O-methylcytidine-3'-phosphate
  modified_base 9: mod_base = OTHER; note = 2'-O-methyluridine-3'-phosphate
  modified_base 10: mod_base = OTHER; note = 2'-O-methyluridine-3'-phosphate
  modified_base 11: mod_base = OTHER; note = 2'-O-methylcytidine-3'-phosphate
  modified_base 12: mod_base = OTHER; note = 2'-O-methylcytidine-3'-phosphate
  modified_base 13: mod_base = OTHER; note = 2'-O-methylcytidine-3'-phosphate
  modified_base 14: mod_base = OTHER; note = 2'-fluorouridine-3'-phosphate
  modified_base 15: mod_base = OTHER; note = 2'-O-methylcytidine-3'-phosphate
  modified_base 16: mod_base = OTHER; note = 2'-fluorouridine-3'-phosphate
  modified_base 17: mod_base = OTHER; note = 2'-O-methylcytidine-3'-phosphate
  modified_base 18: mod_base = OTHER; note = 2'-O-methyladenosine-3'-phosphate
  modified_base 19: mod_base = OTHER; note = 2'-O-methylguanosine-3'-phosphate
  modified_base 20: mod_base = OTHER; note = 2'-O-methyladenosine-3'-phosphate
  modified_base 21: mod_base = OTHER; note = 2'-O-methylcytidine-3'- phosphorothioate
  modified_base 22: mod_base = OTHER; note = 2'-O-methyluridine-3'-phosphorothioate
  modified_base 23: mod_base = OTHER; note = 2'-O-methyladenosine-3'-phosphate
  misc_feature 1..4: note = RNA
  misc_feature 5: note = DNA
  misc_feature 6: note = RNA
  misc_feature 7: note = DNA
  misc_feature 8..23: note = RNA
tagccctcttccctctcagacta

SEQ ID NO: 1130 - RNA, 23 nt, synthetic construct
  source 1..23: mol_type = other RNA
  modified_base 1: mod_base = OTHER; note = Vinyl-phosphonate 2'-O-methyluridine-3'-phosphorothioate
  modified_base 2: mod_base = OTHER; note = 2'-fluorocytidine-3'-phosphorothioate
  modified_base 3: mod_base = OTHER; note = 2'-O-methyladenosine-3'-phosphate
  modified_base 4: mod_base = OTHER; note = 2'-O-methylguanosine-3'-phosphate
  modified_base 5: mod_base = OTHER; note = 2'-O-methylcytidine-3'-phosphate
  modified_base 6: mod_base = OTHER; note = 2'-fluorocytidine-3'-phosphate
  modified_base 7: mod_base = OTHER; note = 2'-O-methylcytidine-3'-phosphate
  modified_base 8: mod_base = OTHER; note = 2'-fluorouridine-3'-phosphate
  modified_base 9: mod_base = OTHER; note = 2'-fluorocytidine-3'-phosphate
  modified_base 10: mod_base = OTHER; note = 2'-O-methyluridine-3'-phosphate
  modified_base 11: mod_base = OTHER; note = 2'-O-methyluridine-3'-phosphate
  modified_base 12: mod_base = OTHER; note = 2'-O-methylcytidine-3'-phosphate
  modified_base 13: mod_base = OTHER; note = 2'-O-methylcytidine-3'-phosphate
  modified_base 14: mod_base = OTHER; note = 2'-fluorocytidine-3'-phosphate
  modified_base 15: mod_base = OTHER; note = 2'-O-methyluridine-3'-phosphate
  modified_base 16: mod_base = OTHER; note = 2'-fluorocytidine-3'-phosphate
  modified_base 17: mod_base = OTHER; note = 2'-O-methyluridine-3'-phosphate
  modified_base 18: mod_base = OTHER; note = 2'-O-methylcytidine-3'-phosphate
  modified_base 19: mod_base = OTHER; note = 2'-O-methyladenosine-3'-phosphate
  modified_base 20: mod_base = OTHER; note = 2'-O-methylguanosine-3'-phosphate
  modified_base 21: mod_base = OTHER; note = 2'-O-methyladenosine-3'- phosphorothioate
  modified_base 22: mod_base = OTHER; note = 2'-O-methylcytidine-3'- phosphorothioate
  modified_base 23: mod_base = OTHER; note = 2'-O-methyluridine-3'-phosphate
tcagccctcttccctctcagact

SEQ ID NO: 1131 - DNA, 23 bp, synthetic construct
  source 1..23: mol_type = other DNA
  modified_base 1: mod_base = OTHER; note = Vinyl-phosphonate 2'-O-methyluridine-3'-phosphorothioate
  modified_base 2: mod_base = OTHER; note = 2'-deoxycytidine-3'-phosphorothioate
  modified_base 3: mod_base = OTHER; note = 2'-O-methyladenosine-3'-phosphate
  modified_base 4: mod_base = OTHER; note = 2'-O-methylguanosine-3'-phosphate
  modified_base 6: mod_base = OTHER; note = 2'-O-methylcytidine-3'-phosphate
  modified_base 8: mod_base = OTHER; note = 2'-O-methyluridine-3'-phosphate
  modified_base 9: mod_base = OTHER; note = 2'-O-methylcytidine-3'-phosphate
  modified_base 10: mod_base = OTHER; note = 2'-O-methyluridine-3'-phosphate
  modified_base 11: mod_base = OTHER; note = 2'-O-methyluridine-3'-phosphate
  modified_base 13: mod_base = OTHER; note = 2'-O-methylcytidine-3'-phosphate
  modified_base 14: mod_base = OTHER; note = 2'-fluorocytidine-3'-phosphate
  modified_base 15: mod_base = OTHER; note = 2'-O-methyluridine-3'-phosphate
  modified_base 16: mod_base = OTHER; note = 2'-O-methylcytidine-3'-phosphate
  modified_base 17: mod_base = OTHER; note = 2'-O-methyluridine-3'-phosphate
  modified_base 18: mod_base = OTHER; note = 2'-O-methylcytidine-3'-phosphate
  modified_base 19: mod_base = OTHER; note = 2'-O-methyladenosine-3'-phosphate
  modified_base 20: mod_base = OTHER; note = 2'-O-methylguanosine-3'-phosphate
  modified_base 21: mod_base = OTHER; note = 2'-O-methyladenosine-3'- phosphorothioate
  modified_base 22: mod_base = OTHER; note = 2'-O-methylcytidine-3'- phosphorothioate
  modified_base 23: mod_base = OTHER; note = 2'-O-methyluridine-3'-phosphate
  misc_feature 1: note = RNA
  misc_feature 2: note = DNA
  misc_feature 3..4: note = RNA
  misc_feature 5: note = DNA
  misc_feature 6: note = RNA
  misc_feature 7: note = DNA
  misc_feature 8..11: note = RNA
  misc_feature 12: note = DNA
  misc_feature 13..23: note = RNA
tcagccctcttccctctcagact

SEQ ID NO: 1132 - RNA, 23 nt, synthetic construct
  source 1..23: mol_type = other RNA
  modified_base 1: mod_base = OTHER; note = Vinyl-phosphonate 2'-O-methyluridine-3'-phosphorothioate
  modified_base 2: mod_base = OTHER; note = 2'-fluorocytidine-3'-phosphorothioate
  modified_base 3: mod_base = OTHER; note = 2'-O-methylcytidine-3'-phosphate
  modified_base 4: mod_base = OTHER; note = 2'-O-methyladenosine-3'-phosphate
  modified_base 5: mod_base = OTHER; note = 2'-O-methylguanosine-3'-phosphate
  modified_base 6: mod_base = OTHER; note = 2'-fluorocytidine-3'-phosphate
  modified_base 7: mod_base = OTHER; note = 2'-O-methylcytidine-3'-phosphate
  modified_base 8: mod_base = OTHER; note = 2'-fluorocytidine-3'-phosphate
  modified_base 9: mod_base = OTHER; note = 2'-fluorouridine-3'-phosphate
  modified_base 10: mod_base = OTHER; note = 2'-O-methylcytidine-3'-phosphate
  modified_base 11: mod_base = OTHER; note = 2'-O-methyluridine-3'-phosphate
  modified_base 12: mod_base = OTHER; note = 2'-O-methyluridine-3'-phosphate
  modified_base 13: mod_base = OTHER; note = 2'-O-methylcytidine-3'-phosphate
  modified_base 14: mod_base = OTHER; note = 2'-fluorocytidine-3'-phosphate
  modified_base 15: mod_base = OTHER; note = 2'-O-methylcytidine-3'-phosphate
  modified_base 16: mod_base = OTHER; note = 2'-fluorouridine-3'-phosphate
  modified_base 17: mod_base = OTHER; note = 2'-O-methylcytidine-3'-phosphate
  modified_base 18: mod_base = OTHER; note = 2'-O-methyluridine-3'-phosphate
  modified_base 19: mod_base = OTHER; note = 2'-O-methylcytidine-3'-phosphate
  modified_base 20: mod_base = OTHER; note = 2'-O-methyladenosine-3'-phosphate
  modified_base 21: mod_base = OTHER; note = 2'-O-methylguanosine-3'- phosphorothioate
  modified_base 22: mod_base = OTHER; note = 2'-O-methyladenosine-3'- phosphorothioate
  modified_base 23: mod_base = OTHER; note = 2'-O-methylcytidine-3'-phosphate
tccagccctcttccctctcagac

SEQ ID NO: 1133 - DNA, 23 bp, synthetic construct
  source 1..23: mol_type = other DNA
  modified_base 1: mod_base = OTHER; note = Vinyl-phosphonate 2'-O-methyluridine-3'-phosphorothioate
  modified_base 2: mod_base = OTHER; note = 2'-deoxycytidine-3'-phosphorothioate
  modified_base 3: mod_base = OTHER; note = 2'-O-methylcytidine-3'-phosphate
  modified_base 4: mod_base = OTHER; note = 2'-O-methyladenosine-3'-phosphate
  modified_base 6: mod_base = OTHER; note = 2'-O-methylcytidine-3'-phosphate
  modified_base 8: mod_base = OTHER; note = 2'-O-methylcytidine-3'-phosphate
  modified_base 9: mod_base = OTHER; note = 2'-O-methyluridine-3'-phosphate
  modified_base 10: mod_base = OTHER; note = 2'-O-methylcytidine-3'-phosphate
  modified_base 11: mod_base = OTHER; note = 2'-O-methyluridine-3'-phosphate
  modified_base 13: mod_base = OTHER; note = 2'-O-methylcytidine-3'-phosphate
  modified_base 14: mod_base = OTHER; note = 2'-fluorocytidine-3'-phosphate
  modified_base 15: mod_base = OTHER; note = 2'-O-methylcytidine-3'-phosphate
  modified_base 16: mod_base = OTHER; note = 2'-O-methyluridine-3'-phosphate
  modified_base 17: mod_base = OTHER; note = 2'-O-methylcytidine-3'-phosphate
  modified_base 18: mod_base = OTHER; note = 2'-O-methyluridine-3'-phosphate
  modified_base 19: mod_base = OTHER; note = 2'-O-methylcytidine-3'-phosphate
  modified_base 20: mod_base = OTHER; note = 2'-O-methyladenosine-3'-phosphate
  modified_base 21: mod_base = OTHER; note = 2'-O-methylguanosine-3'- phosphorothioate
  modified_base 22: mod_base = OTHER; note = 2'-O-methyladenosine-3'- phosphorothioate
  modified_base 23: mod_base = OTHER; note = 2'-O-methylcytidine-3'-phosphate
  misc_feature 1: note = RNA
  misc_feature 2: note = DNA
  misc_feature 3..4: note = RNA
  misc_feature 5: note = DNA
  misc_feature 6: note = RNA
  misc_feature 7: note = DNA
  misc_feature 8..11: note = RNA
  misc_feature 12: note = DNA
  misc_feature 13..23: note = RNA
tccagccctcttccctctcagac

SEQ ID NO: 1134 - RNA, 23 nt, synthetic construct
  source 1..23: mol_type = other RNA
  modified_base 1: mod_base = OTHER; note = Vinyl-phosphonate 2'-O-methyluridine-3'-phosphorothioate
  modified_base 2: mod_base = OTHER; note = 2'-fluorocytidine-3'-phosphorothioate
  modified_base 3: mod_base = OTHER; note = 2'-O-methyladenosine-3'-phosphate
  modified_base 4: mod_base = OTHER; note = 2'-O-methylcytidine-3'-phosphate
  modified_base 5: mod_base = OTHER; note = 2'-O-methyladenosine-3'-phosphate
  modified_base 6: mod_base = OTHER; note = 2'-fluorouridine-3'-phosphate
  modified_base 7: mod_base = OTHER; note = 2'-O-methylcytidine-3'-phosphate
  modified_base 8: mod_base = OTHER; note = 2'-fluorouridine-3'-phosphate
  modified_base 9: mod_base = OTHER; note = 2'-fluorocytidine-3'-phosphate
  modified_base 10: mod_base = OTHER; note = 2'-O-methyluridine-3'-phosphate
  modified_base 11: mod_base = OTHER; note = 2'-O-methylcytidine-3'-phosphate
  modified_base 12: mod_base = OTHER; note = 2'-O-methylcytidine-3'-phosphate
  modified_base 13: mod_base = OTHER; note = 2'-O-methyladenosine-3'-phosphate
  modified_base 14: mod_base = OTHER; note = 2'-fluoroguanosine-3'-phosphate
  modified_base 15: mod_base = OTHER; note = 2'-O-methylcytidine-3'-phosphate
  modified_base 16: mod_base = OTHER; note = 2'-fluorouridine-3'-phosphate
  modified_base 17: mod_base = OTHER; note = 2'-O-methylcytidine-3'-phosphate
  modified_base 18: mod_base = OTHER; note = 2'-O-methylcytidine-3'-phosphate
  modified_base 19: mod_base = OTHER; note = 2'-O-methyladenosine-3'-phosphate
  modified_base 20: mod_base = OTHER; note = 2'-O-methyladenosine-3'-phosphate
  modified_base 21: mod_base = OTHER; note = 2'-O-methyladenosine-3'- phosphorothioate
  modified_base 22: mod_base = OTHER; note = 2'-O-methylcytidine-3'- phosphorothioate
  modified_base 23: mod_base = OTHER; note = 2'-O-methylcytidine-3'-phosphate
tcacatctctccagctccaaacc

SEQ ID NO: 1135 - DNA, 23 bp, synthetic construct
  source 1..23: mol_type = other DNA
  modified_base 1: mod_base = OTHER; note = Vinyl-phosphonate 2'-O-methyluridine-3'-phosphorothioate
  modified_base 2: mod_base = OTHER; note = 2'-deoxycytidine-3'-phosphorothioate
  modified_base 3: mod_base = OTHER; note = 2'-O-methyladenosine-3'-phosphate
  modified_base 4: mod_base = OTHER; note = 2'-O-methylcytidine-3'-phosphate
  modified_base 6: mod_base = OTHER; note = 2'-O-methyluridine-3'-phosphate
  modified_base 8: mod_base = OTHER; note = 2'-O-methyluridine-3'-phosphate
  modified_base 9: mod_base = OTHER; note = 2'-O-methylcytidine-3'-phosphate
  modified_base 10: mod_base = OTHER; note = 2'-O-methyluridine-3'-phosphate
  modified_base 11: mod_base = OTHER; note = 2'-O-methylcytidine-3'-phosphate
  modified_base 13: mod_base = OTHER; note = 2'-O-methyladenosine-3'-phosphate
  modified_base 14: mod_base = OTHER; note = 2'-fluoroguanosine-3'-phosphate
  modified_base 15: mod_base = OTHER; note = 2'-O-methylcytidine-3'-phosphate
  modified_base 16: mod_base = OTHER; note = 2'-O-methyluridine-3'-phosphate
  modified_base 17: mod_base = OTHER; note = 2'-O-methylcytidine-3'-phosphate
  modified_base 18: mod_base = OTHER; note = 2'-O-methylcytidine-3'-phosphate
  modified_base 19: mod_base = OTHER; note = 2'-O-methyladenosine-3'-phosphate
  modified_base 20: mod_base = OTHER; note = 2'-O-methyladenosine-3'-phosphate
  modified_base 21: mod_base = OTHER; note = 2'-O-methyladenosine-3'- phosphorothioate
  modified_base 22: mod_base = OTHER; note = 2'-O-methylcytidine-3'- phosphorothioate
  modified_base 23: mod_base = OTHER; note = 2'-O-methylcytidine-3'-phosphate
  misc_feature 1: note = RNA
  misc_feature 2: note = DNA
  misc_feature 3..4: note = RNA
  misc_feature 5: note = DNA
  misc_feature 6: note = RNA
  misc_feature 7: note = DNA
  misc_feature 8..11: note = RNA
  misc_feature 12: note = DNA
  misc_feature 13..23: note = RNA
tcacatctctccagctccaaacc

SEQ ID NO: 1136 - RNA, 23 nt, synthetic construct
  source 1..23: mol_type = other RNA
  modified_base 1: mod_base = OTHER; note = Vinyl-phosphonate 2'-O-methyluridine-3'-phosphorothioate
  modified_base 2: mod_base = OTHER; note = 2'-fluorocytidine-3'-phosphorothioate
  modified_base 3: mod_base = OTHER; note = 2'-O-methylcytidine-3'-phosphate
  modified_base 4: mod_base = OTHER; note = 2'-O-methyladenosine-3'-phosphate
  modified_base 5: mod_base = OTHER; note = 2'-O-methylcytidine-3'-phosphate
  modified_base 6: mod_base = OTHER; note = 2'-fluoroadenosine-3'-phosphate
  modified_base 7: mod_base = OTHER; note = 2'-O-methyluridine-3'-phosphate
  modified_base 8: mod_base = OTHER; note = 2'-fluorocytidine-3'-phosphate
  modified_base 9: mod_base = OTHER; note = 2'-fluorouridine-3'-phosphate
  modified_base 10: mod_base = OTHER; note = 2'-O-methylcytidine-3'-phosphate
  modified_base 11: mod_base = OTHER; note = 2'-O-methyluridine-3'-phosphate
  modified_base 12: mod_base = OTHER; note = 2'-O-methylcytidine-3'-phosphate
  modified_base 13: mod_base = OTHER; note = 2'-O-methylcytidine-3'-phosphate
  modified_base 14: mod_base = OTHER; note = 2'-fluoroadenosine-3'-phosphate
  modified_base 15: mod_base = OTHER; note = 2'-O-methylguanosine-3'-phosphate
  modified_base 16: mod_base = OTHER; note = 2'-fluorocytidine-3'-phosphate
  modified_base 17: mod_base = OTHER; note = 2'-O-methyluridine-3'-phosphate
  modified_base 18: mod_base = OTHER; note = 2'-O-methylcytidine-3'-phosphate
  modified_base 19: mod_base = OTHER; note = 2'-O-methylcytidine-3'-phosphate
  modified_base 20: mod_base = OTHER; note = 2'-O-methyladenosine-3'-phosphate
  modified_base 21: mod_base = OTHER; note = 2'-O-methyladenosine-3'- phosphorothioate
  modified_base 22: mod_base = OTHER; note = 2'-O-methyladenosine-3'- phosphorothioate
  modified_base 23: mod_base = OTHER; note = 2'-O-methylcytidine-3'-phosphate
tccacatctctccagctccaaac

SEQ ID NO: 1137 - DNA, 23 bp, synthetic construct
  source 1..23: mol_type = other DNA
  modified_base 1: mod_base = OTHER; note = Vinyl-phosphonate 2'-O-methyluridine-3'-phosphorothioate
  modified_base 2: mod_base = OTHER; note = 2'-deoxycytidine-3'-phosphorothioate
  modified_base 3: mod_base = OTHER; note = 2'-O-methylcytidine-3'-phosphate
  modified_base 4: mod_base = OTHER; note = 2'-O-methyladenosine-3'-phosphate
  modified_base 6: mod_base = OTHER; note = 2'-O-methyladenosine-3'-phosphate
  modified_base 8: mod_base = OTHER; note = 2'-O-methylcytidine-3'-phosphate
  modified_base 9: mod_base = OTHER; note = 2'-O-methyluridine-3'-phosphate
  modified_base 10: mod_base = OTHER; note = 2'-O-methylcytidine-3'-phosphate
  modified_base 11: mod_base = OTHER; note = 2'-O-methyluridine-3'-phosphate
  modified_base 13: mod_base = OTHER; note = 2'-O-methylcytidine-3'-phosphate
  modified_base 14: mod_base = OTHER; note = 2'-fluoroadenosine-3'-phosphate
  modified_base 15: mod_base = OTHER; note = 2'-O-methylguanosine-3'-phosphate
  modified_base 16: mod_base = OTHER; note = 2'-O-methylcytidine-3'-phosphate
  modified_base 17: mod_base = OTHER; note = 2'-O-methyluridine-3'-phosphate
  modified_base 18: mod_base = OTHER; note = 2'-O-methylcytidine-3'-phosphate
  modified_base 19: mod_base = OTHER; note = 2'-O-methylcytidine-3'-phosphate
  modified_base 20: mod_base = OTHER; note = 2'-O-methyladenosine-3'-phosphate
  modified_base 21: mod_base = OTHER; note = 2'-O-methyladenosine-3'- phosphorothioate
  modified_base 22: mod_base = OTHER; note = 2'-O-methyladenosine-3'- phosphorothioate
  modified_base 23: mod_base = OTHER; note = 2'-O-methylcytidine-3'-phosphate
  misc_feature 1: note = RNA
  misc_feature 2: note = DNA
  misc_feature 3..4: note = RNA
  misc_feature 5: note = DNA
  misc_feature 6: note = RNA
  misc_feature 7: note = DNA
  misc_feature 8..11: note = RNA
  misc_feature 12: note = DNA
  misc_feature 13..23: note = RNA
tccacatctctccagctccaaac

SEQ ID NO: 1138 - RNA, 23 nt, synthetic construct
  source 1..23: mol_type = other RNA
  modified_base 1: mod_base = OTHER; note = Vinyl-phosphonate 2'-O-methyluridine-3'-phosphorothioate
  modified_base 2: mod_base = OTHER; note = 2'-fluoroadenosine-3'-phosphorothioate
  modified_base 3: mod_base = OTHER; note = 2'-O-methylguanosine-3'-phosphate
  modified_base 4: mod_base = OTHER; note = 2'-O-methylcytidine-3'-phosphate
  modified_base 5: mod_base = OTHER; note = 2'-O-methyladenosine-3'-phosphate
  modified_base 6: mod_base = OTHER; note = 2'-fluorouridine-3'-phosphate
  modified_base 7: mod_base = OTHER; note = 2'-O-methyluridine-3'-phosphate
  modified_base 8: mod_base = OTHER; note = 2'-fluoroadenosine-3'-phosphate
  modified_base 9: mod_base = OTHER; note = 2'-fluorouridine-3'-phosphate
  modified_base 10: mod_base = OTHER; note = 2'-O-methylguanosine-3'-phosphate
  modified_base 11: mod_base = OTHER; note = 2'-O-methyluridine-3'-phosphate
  modified_base 12: mod_base = OTHER; note = 2'-O-methylcytidine-3'-phosphate
  modified_base 13: mod_base = OTHER; note = 2'-O-methyladenosine-3'-phosphate
  modified_base 14: mod_base = OTHER; note = 2'-fluorouridine-3'-phosphate
  modified_base 15: mod_base = OTHER; note = 2'-O-methylcytidine-3'-phosphate
  modified_base 16: mod_base = OTHER; note = 2'-fluorocytidine-3'-phosphate
  modified_base 17: mod_base = OTHER; note = 2'-O-methyladenosine-3'-phosphate
  modified_base 18: mod_base = OTHER; note = 2'-O-methylcytidine-3'-phosphate
  modified_base 19: mod_base = OTHER; note = 2'-O-methyluridine-3'-phosphate
  modified_base 20: mod_base = OTHER; note = 2'-O-methylguanosine-3'-phosphate
  modified_base 21: mod_base = OTHER; note = 2'-O-methylcytidine-3'- phosphorothioate
  modified_base 22: mod_base = OTHER; note = 2'-O-methylcytidine-3'- phosphorothioate
  modified_base 23: mod_base = OTHER; note = 2'-O-methylcytidine-3'-phosphate
tagcattatgtcatccactgccc

SEQ ID NO: 1139 - DNA, 23 bp, synthetic construct
  source 1..23: mol_type = other DNA
  modified_base 1: mod_base = OTHER; note = Vinyl-phosphonate 2'-O-methyluridine-3'-phosphorothioate
  modified_base 2: mod_base = OTHER; note = 2'-deoxyadenosine-3'-phosphorothioate
  modified_base 3: mod_base = OTHER; note = 2'-O-methylguanosine-3'-phosphate
  modified_base 4: mod_base = OTHER; note = 2'-O-methylcytidine-3'-phosphate
  modified_base 6: mod_base = OTHER; note = 2'-O-methyluridine-3'-phosphate
  modified_base 8: mod_base = OTHER; note = 2'-O-methyladenosine-3'-phosphate
  modified_base 9: mod_base = OTHER; note = 2'-O-methyluridine-3'-phosphate
  modified_base 10: mod_base = OTHER; note = 2'-O-methylguanosine-3'-phosphate
  modified_base 11: mod_base = OTHER; note = 2'-O-methyluridine-3'-phosphate
  modified_base 13: mod_base = OTHER; note = 2'-O-methyladenosine-3'-phosphate
  modified_base 14: mod_base = OTHER; note = 2'-fluorouridine-3'-phosphate
  modified_base 15: mod_base = OTHER; note = 2'-O-methylcytidine-3'-phosphate
  modified_base 16: mod_base = OTHER; note = 2'-O-methylcytidine-3'-phosphate
  modified_base 17: mod_base = OTHER; note = 2'-O-methyladenosine-3'-phosphate
  modified_base 18: mod_base = OTHER; note = 2'-O-methylcytidine-3'-phosphate
  modified_base 19: mod_base = OTHER; note = 2'-O-methyluridine-3'-phosphate
  modified_base 20: mod_base = OTHER; note = 2'-O-methylguanosine-3'-phosphate
  modified_base 21: mod_base = OTHER; note = 2'-O-methylcytidine-3'- phosphorothioate
  modified_base 22: mod_base = OTHER; note = 2'-O-methylcytidine-3'- phosphorothioate
  modified_base 23: mod_base = OTHER; note = 2'-O-methylcytidine-3'-phosphate
  misc_feature 1: note = RNA
  misc_feature 2: note = DNA
  misc_feature 3..4: note = RNA
  misc_feature 5: note = DNA
  misc_feature 6: note = RNA
  misc_feature 7: note = DNA
  misc_feature 8..11: note = RNA
  misc_feature 12: note = DNA
  misc_feature 13..23: note = RNA
tagcattatgtcatccactgccc

SEQ ID NO: 1140 - DNA, 23 bp, synthetic construct
  source 1..23: mol_type = other DNA
  modified_base 1: mod_base = OTHER; note = Vinyl-phosphonate 2'-O-methyluridine-3'-phosphorothioate
  modified_base 2: mod_base = OTHER; note = 2'-fluoroadenosine-3'-phosphorothioate
  modified_base 3: mod_base = OTHER; note = 2'-O-methyladenosine-3'-phosphate
  modified_base 4: mod_base = OTHER; note = 2'-O-methylguanosine-3'-phosphate
  modified_base 6: mod_base = OTHER; note = 2'-O-methyladenosine-3'-phosphate
  modified_base 7: mod_base = OTHER; note = Thymidine-glycol nucleic acid (GNA) S-Isomer
  modified_base 8: mod_base = OTHER; note = 2'-O-methyluridine-3'-phosphate
  modified_base 9: mod_base = OTHER; note = 2'-O-methyladenosine-3'-phosphate
  modified_base 10: mod_base = OTHER; note = 2'-O-methyluridine-3'-phosphate
  modified_base 11: mod_base = OTHER; note = 2'-O-methylguanosine-3'-phosphate
  modified_base 12: mod_base = OTHER; note = 2'-O-methyluridine-3'-phosphate
  modified_base 13: mod_base = OTHER; note = 2'-O-methylcytidine-3'-phosphate
  modified_base 14: mod_base = OTHER; note = 2'-fluoroadenosine-3'-phosphate
  modified_base 15: mod_base = OTHER; note = 2'-O-methyluridine-3'-phosphate
  modified_base 16: mod_base = OTHER; note = 2'-fluorocytidine-3'-phosphate
  modified_base 17: mod_base = OTHER; note = 2'-O-methylcytidine-3'-phosphate
  modified_base 18: mod_base = OTHER; note = 2'-O-methyladenosine-3'-phosphate
  modified_base 19: mod_base = OTHER; note = 2'-O-methylcytidine-3'-phosphate
  modified_base 20: mod_base = OTHER; note = 2'-O-methyluridine-3'-phosphate
  modified_base 21: mod_base = OTHER; note = 2'-O-methylguanosine-3'- phosphorothioate
  modified_base 22: mod_base = OTHER; note = 2'-O-methylcytidine-3'- phosphorothioate
  modified_base 23: mod_base = OTHER; note = 2'-O-methylcytidine-3'-phosphate
  misc_feature 1..4: note = RNA
  misc_feature 5: note = DNA
  misc_feature 6: note = RNA
  misc_feature 7: note = DNA
  misc_feature 8..23: note = RNA
taagcattatgtcatccactgcc

SEQ ID NO: 1141 - RNA, 23 nt, synthetic construct
  source 1..23: mol_type = other RNA
  modified_base 1: mod_base = OTHER; note = Vinyl-phosphonate 2'-O-methyluridine-3'-phosphorothioate
  modified_base 2: mod_base = OTHER; note = 2'-fluoroadenosine-3'-phosphorothioate
  modified_base 3: mod_base = OTHER; note = 2'-O-methyladenosine-3'-phosphate
  modified_base 4: mod_base = OTHER; note = 2'-O-methylguanosine-3'-phosphate
  modified_base 5: mod_base = OTHER; note = 2'-O-methylcytidine-3'-phosphate
  modified_base 6: mod_base = OTHER; note = 2'-fluoroadenosine-3'-phosphate
  modified_base 7: mod_base = OTHER; note = 2'-O-methyluridine-3'-phosphate
  modified_base 8: mod_base = OTHER; note = 2'-fluorouridine-3'-phosphate
  modified_base 9: mod_base = OTHER; note = 2'-fluoroadenosine-3'-phosphate
  modified_base 10: mod_base = OTHER; note = 2'-O-methyluridine-3'-phosphate
  modified_base 11: mod_base = OTHER; note = 2'-O-methylguanosine-3'-phosphate
  modified_base 12: mod_base = OTHER; note = 2'-O-methyluridine-3'-phosphate
  modified_base 13: mod_base = OTHER; note = 2'-O-methylcytidine-3'-phosphate
  modified_base 14: mod_base = OTHER; note = 2'-fluoroadenosine-3'-phosphate
  modified_base 15: mod_base = OTHER; note = 2'-O-methyluridine-3'-phosphate
  modified_base 16: mod_base = OTHER; note = 2'-fluorocytidine-3'-phosphate
  modified_base 17: mod_base = OTHER; note = 2'-O-methylcytidine-3'-phosphate
  modified_base 18: mod_base = OTHER; note = 2'-O-methyladenosine-3'-phosphate
  modified_base 19: mod_base = OTHER; note = 2'-O-methylcytidine-3'-phosphate
  modified_base 20: mod_base = OTHER; note = 2'-O-methyluridine-3'-phosphate
  modified_base 21: mod_base = OTHER; note = 2'-O-methylguanosine-3'- phosphorothioate
  modified_base 22: mod_base = OTHER; note = 2'-O-methylcytidine-3'- phosphorothioate
  modified_base 23: mod_base = OTHER; note = 2'-O-methylcytidine-3'-phosphate
taagcattatgtcatccactgcc

SEQ ID NO: 1142 - DNA, 23 bp, synthetic construct
  source 1..23: mol_type = other DNA
  modified_base 1: mod_base = OTHER; note = Vinyl-phosphonate 2'-O-methyluridine-3'-phosphorothioate
  modified_base 2: mod_base = OTHER; note = 2'-deoxyadenosine-3'-phosphorothioate
  modified_base 3: mod_base = OTHER; note = 2'-O-methyladenosine-3'-phosphate
  modified_base 4: mod_base = OTHER; note = 2'-O-methylguanosine-3'-phosphate
  modified_base 6: mod_base = OTHER; note = 2'-O-methyladenosine-3'-phosphate
  modified_base 8: mod_base = OTHER; note = 2'-O-methyluridine-3'-phosphate
  modified_base 9: mod_base = OTHER; note = 2'-O-methyladenosine-3'-phosphate
  modified_base 10: mod_base = OTHER; note = 2'-O-methyluridine-3'-phosphate
  modified_base 11: mod_base = OTHER; note = 2'-O-methylguanosine-3'-phosphate
  modified_base 13: mod_base = OTHER; note = 2'-O-methylcytidine-3'-phosphate
  modified_base 14: mod_base = OTHER; note = 2'-fluoroadenosine-3'-phosphate
  modified_base 15: mod_base = OTHER; note = 2'-O-methyluridine-3'-phosphate
  modified_base 16: mod_base = OTHER; note = 2'-O-methylcytidine-3'-phosphate
  modified_base 17: mod_base = OTHER; note = 2'-O-methylcytidine-3'-phosphate
  modified_base 18: mod_base = OTHER; note = 2'-O-methyladenosine-3'-phosphate
  modified_base 19: mod_base = OTHER; note = 2'-O-methylcytidine-3'-phosphate
  modified_base 20: mod_base = OTHER; note = 2'-O-methyluridine-3'-phosphate
  modified_base 21: mod_base = OTHER; note = 2'-O-methylguanosine-3'- phosphorothioate
  modified_base 22: mod_base = OTHER; note = 2'-O-methylcytidine-3'- phosphorothioate
  modified_base 23: mod_base = OTHER; note = 2'-O-methylcytidine-3'-phosphate
  misc_feature 1: note = RNA
  misc_feature 2: note = DNA
  misc_feature 3..4: note = RNA
  misc_feature 5: note = DNA
  misc_feature 6: note = RNA
  misc_feature 7: note = DNA
  misc_feature 8..11: note = RNA
  misc_feature 12: note = DNA
  misc_feature 13..23: note = RNA
taagcattatgtcatccactgcc

SEQ ID NO: 1143 - RNA, 23 nt, synthetic construct
  source 1..23: mol_type = other RNA
  modified_base 1: mod_base = OTHER; note = Vinyl-phosphonate 2'-O-methyluridine-3'-phosphorothioate
  modified_base 2: mod_base = OTHER; note = 2'-fluoroadenosine-3'-phosphorothioate
  modified_base 3: mod_base = OTHER; note = 2'-O-methylcytidine-3'-phosphate
  modified_base 4: mod_base = OTHER; note = 2'-O-methyluridine-3'-phosphate
  modified_base 5: mod_base = OTHER; note = 2'-O-methylcytidine-3'-phosphate
  modified_base 6: mod_base = OTHER; note = 2'-fluorocytidine-3'-phosphate
  modified_base 7: mod_base = OTHER; note = 2'-O-methylcytidine-3'-phosphate
  modified_base 8: mod_base = OTHER; note = 2'-fluoroguanosine-3'-phosphate
  modified_base 9: mod_base = OTHER; note = 2'-fluorocytidine-3'-phosphate
  modified_base 10: mod_base = OTHER; note = 2'-O-methylcytidine-3'-phosphate
  modified_base 11: mod_base = OTHER; note = 2'-O-methylguanosine-3'-phosphate
  modified_base 12: mod_base = OTHER; note = 2'-O-methyladenosine-3'-phosphate
  modified_base 13: mod_base = OTHER; note = 2'-O-methylguanosine-3'-phosphate
  modified_base 14: mod_base = OTHER; note = 2'-fluoroguanosine-3'-phosphate
  modified_base 15: mod_base = OTHER; note = 2'-O-methylcytidine-3'-phosphate
  modified_base 16: mod_base = OTHER; note = 2'-fluoroguanosine-3'-phosphate
  modified_base 17: mod_base = OTHER; note = 2'-O-methyluridine-3'-phosphate
  modified_base 18: mod_base = OTHER; note = 2'-O-methylcytidine-3'-phosphate
  modified_base 19: mod_base = OTHER; note = 2'-O-methylcytidine-3'-phosphate
  modified_base 20: mod_base = OTHER; note = 2'-O-methyluridine-3'-phosphate
  modified_base 21: mod_base = OTHER; note = 2'-O-methyladenosine-3'- phosphorothioate
  modified_base 22: mod_base = OTHER; note = 2'-O-methyladenosine-3'- phosphorothioate
  modified_base 23: mod_base = OTHER; note = 2'-O-methyladenosine-3'-phosphate
tactcccgccgaggcgtcctaaa

SEQ ID NO: 1144 - DNA, 23 bp, synthetic construct
  source 1..23: mol_type = other DNA
  modified_base 1: mod_base = OTHER; note = Vinyl-phosphonate 2'-O-methyluridine-3'-phosphorothioate
  modified_base 2: mod_base = OTHER; note = 2'-fluorouridine -3'-phosphorothioate
  modified_base 3: mod_base = OTHER; note = 2'-O-methylcytidine-3'-phosphate
  modified_base 4: mod_base = OTHER; note = 2'-O-methylcytidine-3'-phosphate
  modified_base 6: mod_base = OTHER; note = 2'-O-methyladenosine-3'-phosphate
  modified_base 7: mod_base = OTHER; note = Thymidine-glycol nucleic acid (GNA) S-Isomer
  modified_base 8: mod_base = OTHER; note = 2'-O-methyluridine-3'-phosphate
  modified_base 9: mod_base = OTHER; note = 2'-O-methylguanosine-3'-phosphate
  modified_base 10: mod_base = OTHER; note = 2'-O-methylguanosine-3'-phosphate
  modified_base 11: mod_base = OTHER; note = 2'-O-methyladenosine-3'-phosphate
  modified_base 12: mod_base = OTHER; note = 2'-O-methylcytidine-3'-phosphate
  modified_base 13: mod_base = OTHER; note = 2'-O-methylguanosine-3'-phosphate
  modified_base 14: mod_base = OTHER; note = 2'-fluorocytidine-3'-phosphate
  modified_base 15: mod_base = OTHER; note = 2'-O-methylguanosine-3'-phosphate
  modified_base 16: mod_base = OTHER; note = 2'-fluorocytidine-3'-phosphate
  modified_base 17: mod_base = OTHER; note = 2'-O-methylcytidine-3'-phosphate
  modified_base 18: mod_base = OTHER; note = 2'-O-methylcytidine-3'-phosphate
  modified_base 19: mod_base = OTHER; note = 2'-O-methyluridine-3'-phosphate
  modified_base 20: mod_base = OTHER; note = 2'-O-methylcytidine-3'-phosphate
  modified_base 21: mod_base = OTHER; note = 2'-O-methyladenosine-3'- phosphorothioate
  modified_base 22: mod_base = OTHER; note = 2'-O-methylcytidine-3'- phosphorothioate
  modified_base 23: mod_base = OTHER; note = 2'-O-methyluridine-3'-phosphate
  misc_feature 1..4: note = RNA
  misc_feature 5: note = DNA
  misc_feature 6: note = RNA
  misc_feature 7: note = DNA
  misc_feature 8..23: note = RNA
ttcccattggacgcgccctcact

SEQ ID NO: 1145 - RNA, 23 nt, synthetic construct
  source 1..23: mol_type = other RNA
  modified_base 1: mod_base = OTHER; note = Vinyl-phosphonate 2'-O-methyluridine-3'-phosphorothioate
  modified_base 2: mod_base = OTHER; note = 2'-fluorouridine -3'-phosphorothioate
  modified_base 3: mod_base = OTHER; note = 2'-O-methylcytidine-3'-phosphate
  modified_base 4: mod_base = OTHER; note = 2'-O-methylcytidine-3'-phosphate
  modified_base 5: mod_base = OTHER; note = 2'-O-methylcytidine-3'-phosphate
  modified_base 6: mod_base = OTHER; note = 2'-fluoroadenosine-3'-phosphate
  modified_base 7: mod_base = OTHER; note = 2'-O-methyluridine-3'-phosphate
  modified_base 8: mod_base = OTHER; note = 2'-fluorouridine-3'-phosphate
  modified_base 9: mod_base = OTHER; note = 2'-fluoroguanosine-3'-phosphate
  modified_base 10: mod_base = OTHER; note = 2'-O-methylguanosine-3'-phosphate
  modified_base 11: mod_base = OTHER; note = 2'-O-methyladenosine-3'-phosphate
  modified_base 12: mod_base = OTHER; note = 2'-O-methylcytidine-3'-phosphate
  modified_base 13: mod_base = OTHER; note = 2'-O-methylguanosine-3'-phosphate
  modified_base 14: mod_base = OTHER; note = 2'-fluorocytidine-3'-phosphate
  modified_base 15: mod_base = OTHER; note = 2'-O-methylguanosine-3'-phosphate
  modified_base 16: mod_base = OTHER; note = 2'-fluorocytidine-3'-phosphate
  modified_base 17: mod_base = OTHER; note = 2'-O-methylcytidine-3'-phosphate
  modified_base 18: mod_base = OTHER; note = 2'-O-methylcytidine-3'-phosphate
  modified_base 19: mod_base = OTHER; note = 2'-O-methyluridine-3'-phosphate
  modified_base 20: mod_base = OTHER; note = 2'-O-methylcytidine-3'-phosphate
  modified_base 21: mod_base = OTHER; note = 2'-O-methyladenosine-3'- phosphorothioate
  modified_base 22: mod_base = OTHER; note = 2'-O-methylcytidine-3'- phosphorothioate
  modified_base 23: mod_base = OTHER; note = 2'-O-methyluridine-3'-phosphate
ttcccattggacgcgccctcact

SEQ ID NO: 1146 - DNA, 23 bp, synthetic construct
  source 1..23: mol_type = other DNA
  modified_base 1: mod_base = OTHER; note = Vinyl-phosphonate 2'-O-methyluridine-3'-phosphorothioate
  modified_base 2: mod_base = OTHER; note = 2'-deoxythymidine-3'-phosphorothioate
  modified_base 3: mod_base = OTHER; note = 2'-O-methylcytidine-3'-phosphate
  modified_base 4: mod_base = OTHER; note = 2'-O-methylcytidine-3'-phosphate
  modified_base 6: mod_base = OTHER; note = 2'-O-methyladenosine-3'-phosphate
  modified_base 8: mod_base = OTHER; note = 2'-O-methyluridine-3'-phosphate
  modified_base 9: mod_base = OTHER; note = 2'-O-methylguanosine-3'-phosphate
  modified_base 10: mod_base = OTHER; note = 2'-O-methylguanosine-3'-phosphate
  modified_base 11: mod_base = OTHER; note = 2'-O-methyladenosine-3'-phosphate
  modified_base 13: mod_base = OTHER; note = 2'-O-methylguanosine-3'-phosphate
  modified_base 14: mod_base = OTHER; note = 2'-fluorocytidine-3'-phosphate
  modified_base 15: mod_base = OTHER; note = 2'-O-methylguanosine-3'-phosphate
  modified_base 16: mod_base = OTHER; note = 2'-O-methylcytidine-3'-phosphate
  modified_base 17: mod_base = OTHER; note = 2'-O-methylcytidine-3'-phosphate
  modified_base 18: mod_base = OTHER; note = 2'-O-methylcytidine-3'-phosphate
  modified_base 19: mod_base = OTHER; note = 2'-O-methyluridine-3'-phosphate
  modified_base 20: mod_base = OTHER; note = 2'-O-methylcytidine-3'-phosphate
  modified_base 21: mod_base = OTHER; note = 2'-O-methyladenosine-3'- phosphorothioate
  modified_base 22: mod_base = OTHER; note = 2'-O-methylcytidine-3'- phosphorothioate
  modified_base 23: mod_base = OTHER; note = 2'-O-methyluridine-3'-phosphate
  misc_feature 1: note = RNA
  misc_feature 2: note = DNA
  misc_feature 3..4: note = RNA
  misc_feature 5: note = DNA
  misc_feature 6: note = RNA
  misc_feature 7: note = DNA
  misc_feature 8..11: note = RNA
  misc_feature 12: note = DNA
  misc_feature 13..23: note = RNA
ttcccattggacgcgccctcact

SEQ ID NO: 1147 - DNA, 23 bp, synthetic construct
  source 1..23: mol_type = other DNA
  modified_base 1: mod_base = OTHER; note = Vinyl-phosphonate 2'-O-methyluridine-3'-phosphorothioate
  modified_base 2: mod_base = OTHER; note = 2'-fluoroadenosine-3'-phosphorothioate
  modified_base 3: mod_base = OTHER; note = 2'-O-methylguanosine-3'-phosphate
  modified_base 4: mod_base = OTHER; note = 2'-O-methyladenosine-3'-phosphate
  modified_base 6: mod_base = OTHER; note = 2'-O-methyladenosine-3'-phosphate
  modified_base 7: mod_base = OTHER; note = Thymidine-glycol nucleic acid (GNA) S-Isomer
  modified_base 8: mod_base = OTHER; note = 2'-O-methylcytidine-3'-phosphate
  modified_base 9: mod_base = OTHER; note = 2'-O-methyluridine-3'-phosphate
  modified_base 10: mod_base = OTHER; note = 2'-O-methylcytidine-3'-phosphate
  modified_base 11: mod_base = OTHER; note = 2'-O-methylcytidine-3'-phosphate
  modified_base 12: mod_base = OTHER; note = 2'-O-methylcytidine-3'-phosphate
  modified_base 13: mod_base = OTHER; note = 2'-O-methyladenosine-3'-phosphate
  modified_base 14: mod_base = OTHER; note = 2'-fluorouridine-3'-phosphate
  modified_base 15: mod_base = OTHER; note = 2'-O-methyluridine-3'-phosphate
  modified_base 16: mod_base = OTHER; note = 2'-fluoroguanosine-3'-phosphate
  modified_base 17: mod_base = OTHER; note = 2'-O-methylguanosine-3'-phosphate
  modified_base 18: mod_base = OTHER; note = 2'-O-methyladenosine-3'-phosphate
  modified_base 19: mod_base = OTHER; note = 2'-O-methylcytidine-3'-phosphate
  modified_base 20: mod_base = OTHER; note = 2'-O-methylguanosine-3'-phosphate
  modified_base 21: mod_base = OTHER; note = 2'-O-methylcytidine-3'- phosphorothioate
  modified_base 22: mod_base = OTHER; note = 2'-O-methylguanosine-3'- phosphorothioate
  modified_base 23: mod_base = OTHER; note = 2'-O-methylcytidine-3'-phosphate
  misc_feature 1..4: note = RNA
  misc_feature 5: note = DNA
  misc_feature 6: note = RNA
  misc_feature 7: note = DNA
  misc_feature 8..23: note = RNA
tagaaatctcccattggacgcgc

SEQ ID NO: 1148 - RNA, 23 nt, synthetic construct
  source 1..23: mol_type = other RNA
  modified_base 1: mod_base = OTHER; note = Vinyl-phosphonate 2'-O-methyluridine-3'-phosphorothioate
  modified_base 2: mod_base = OTHER; note = 2'-fluoroadenosine-3'-phosphorothioate
  modified_base 3: mod_base = OTHER; note = 2'-O-methylguanosine-3'-phosphate
  modified_base 4: mod_base = OTHER; note = 2'-O-methyladenosine-3'-phosphate
  modified_base 5: mod_base = OTHER; note = 2'-O-methyladenosine-3'-phosphate
  modified_base 6: mod_base = OTHER; note = 2'-fluoroadenosine-3'-phosphate
  modified_base 7: mod_base = OTHER; note = 2'-O-methyluridine-3'-phosphate
  modified_base 8: mod_base = OTHER; note = 2'-fluorocytidine-3'-phosphate
  modified_base 9: mod_base = OTHER; note = 2'-fluorouridine-3'-phosphate
  modified_base 10: mod_base = OTHER; note = 2'-O-methylcytidine-3'-phosphate
  modified_base 11: mod_base = OTHER; note = 2'-O-methylcytidine-3'-phosphate
  modified_base 12: mod_base = OTHER; note = 2'-O-methylcytidine-3'-phosphate
  modified_base 13: mod_base = OTHER; note = 2'-O-methyladenosine-3'-phosphate
  modified_base 14: mod_base = OTHER; note = 2'-fluorouridine-3'-phosphate
  modified_base 15: mod_base = OTHER; note = 2'-O-methyluridine-3'-phosphate
  modified_base 16: mod_base = OTHER; note = 2'-fluoroguanosine-3'-phosphate
  modified_base 17: mod_base = OTHER; note = 2'-O-methylguanosine-3'-phosphate
  modified_base 18: mod_base = OTHER; note = 2'-O-methyladenosine-3'-phosphate
  modified_base 19: mod_base = OTHER; note = 2'-O-methylcytidine-3'-phosphate
  modified_base 20: mod_base = OTHER; note = 2'-O-methylguanosine-3'-phosphate
  modified_base 21: mod_base = OTHER; note = 2'-O-methylcytidine-3'- phosphorothioate
  modified_base 22: mod_base = OTHER; note = 2'-O-methylguanosine-3'- phosphorothioate
  modified_base 23: mod_base = OTHER; note = 2'-O-methylcytidine-3'-phosphate
tagaaatctcccattggacgcgc

SEQ ID NO: 1149 - DNA, 23 bp, synthetic construct
  source 1..23: mol_type = other DNA
  modified_base 1: mod_base = OTHER; note = Vinyl-phosphonate 2'-O-methyluridine-3'-phosphorothioate
  modified_base 2: mod_base = OTHER; note = 2'-deoxyadenosine-3'-phosphorothioate
  modified_base 3: mod_base = OTHER; note = 2'-O-methylguanosine-3'-phosphate
  modified_base 4: mod_base = OTHER; note = 2'-O-methyladenosine-3'-phosphate
  modified_base 6: mod_base = OTHER; note = 2'-O-methyladenosine-3'-phosphate
  modified_base 8: mod_base = OTHER; note = 2'-O-methylcytidine-3'-phosphate
  modified_base 9: mod_base = OTHER; note = 2'-O-methyluridine-3'-phosphate
  modified_base 10: mod_base = OTHER; note = 2'-O-methylcytidine-3'-phosphate
  modified_base 11: mod_base = OTHER; note = 2'-O-methylcytidine-3'-phosphate
  modified_base 13: mod_base = OTHER; note = 2'-O-methyladenosine-3'-phosphate
  modified_base 14: mod_base = OTHER; note = 2'-fluorouridine-3'-phosphate
  modified_base 15: mod_base = OTHER; note = 2'-O-methyluridine-3'-phosphate
  modified_base 16: mod_base = OTHER; note = 2'-O-methylguanosine-3'-phosphate
  modified_base 17: mod_base = OTHER; note = 2'-O-methylguanosine-3'-phosphate
  modified_base 18: mod_base = OTHER; note = 2'-O-methyladenosine-3'-phosphate
  modified_base 19: mod_base = OTHER; note = 2'-O-methylcytidine-3'-phosphate
  modified_base 20: mod_base = OTHER; note = 2'-O-methylguanosine-3'-phosphate
  modified_base 21: mod_base = OTHER; note = 2'-O-methylcytidine-3'- phosphorothioate
  modified_base 22: mod_base = OTHER; note = 2'-O-methylguanosine-3'- phosphorothioate
  modified_base 23: mod_base = OTHER; note = 2'-O-methylcytidine-3'-phosphate
  misc_feature 1: note = RNA
  misc_feature 2: note = DNA
  misc_feature 3..4: note = RNA
  misc_feature 5: note = DNA
  misc_feature 6: note = RNA
  misc_feature 7: note = DNA
  misc_feature 8..11: note = RNA
  misc_feature 12: note = DNA
  misc_feature 13..23: note = RNA
tagaaatctcccattggacgcgc

SEQ ID NO: 1150 - RNA, 23 nt, synthetic construct
  source 1..23: mol_type = other RNA
  modified_base 1: mod_base = OTHER; note = Vinyl-phosphonate 2'-O-methyluridine-3'-phosphorothioate
  modified_base 2: mod_base = OTHER; note = 2'-fluoroadenosine-3'-phosphorothioate
  modified_base 3: mod_base = OTHER; note = 2'-O-methyladenosine-3'-phosphate
  modified_base 4: mod_base = OTHER; note = 2'-O-methylguanosine-3'-phosphate
  modified_base 5: mod_base = OTHER; note = 2'-O-methyladenosine-3'-phosphate
  modified_base 6: mod_base = OTHER; note = 2'-fluoroadenosine-3'-phosphate
  modified_base 7: mod_base = OTHER; note = 2'-O-methyladenosine-3'-phosphate
  modified_base 8: mod_base = OTHER; note = 2'-fluorouridine-3'-phosphate
  modified_base 9: mod_base = OTHER; note = 2'-fluorocytidine-3'-phosphate
  modified_base 10: mod_base = OTHER; note = 2'-O-methyluridine-3'-phosphate
  modified_base 11: mod_base = OTHER; note = 2'-O-methylcytidine-3'-phosphate
  modified_base 12: mod_base = OTHER; note = 2'-O-methylcytidine-3'-phosphate
  modified_base 13: mod_base = OTHER; note = 2'-O-methylcytidine-3'-phosphate
  modified_base 14: mod_base = OTHER; note = 2'-fluoroadenosine-3'-phosphate
  modified_base 15: mod_base = OTHER; note = 2'-O-methyluridine-3'-phosphate
  modified_base 16: mod_base = OTHER; note = 2'-fluorouridine-3'-phosphate
  modified_base 17: mod_base = OTHER; note = 2'-O-methylguanosine-3'-phosphate
  modified_base 18: mod_base = OTHER; note = 2'-O-methylguanosine-3'-phosphate
  modified_base 19: mod_base = OTHER; note = 2'-O-methyladenosine-3'-phosphate
  modified_base 20: mod_base = OTHER; note = 2'-O-methylcytidine-3'-phosphate
  modified_base 21: mod_base = OTHER; note = 2'-O-methylguanosine-3'- phosphorothioate
  modified_base 22: mod_base = OTHER; note = 2'-O-methylcytidine-3'- phosphorothioate
  modified_base 23: mod_base = OTHER; note = 2'-O-methylguanosine-3'-phosphate
taagaaatctcccattggacgcg

SEQ ID NO: 1151 - DNA, 23 bp, synthetic construct
  source 1..23: mol_type = other DNA
  modified_base 1: mod_base = OTHER; note = Vinyl-phosphonate 2'-O-methyluridine-3'-phosphorothioate
  modified_base 2: mod_base = OTHER; note = 2'-deoxyadenosine-3'-phosphorothioate
  modified_base 3: mod_base = OTHER; note = 2'-O-methyladenosine-3'-phosphate
  modified_base 4: mod_base = OTHER; note = 2'-O-methylguanosine-3'-phosphate
  modified_base 6: mod_base = OTHER; note = 2'-O-methyladenosine-3'-phosphate
  modified_base 8: mod_base = OTHER; note = 2'-O-methyluridine-3'-phosphate
  modified_base 9: mod_base = OTHER; note = 2'-O-methylcytidine-3'-phosphate
  modified_base 10: mod_base = OTHER; note = 2'-O-methyluridine-3'-phosphate
  modified_base 11: mod_base = OTHER; note = 2'-O-methylcytidine-3'-phosphate
  modified_base 13: mod_base = OTHER; note = 2'-O-methylcytidine-3'-phosphate
  modified_base 14: mod_base = OTHER; note = 2'-fluoroadenosine-3'-phosphate
  modified_base 15: mod_base = OTHER; note = 2'-O-methyluridine-3'-phosphate
  modified_base 16: mod_base = OTHER; note = 2'-O-methyluridine-3'-phosphate
  modified_base 17: mod_base = OTHER; note = 2'-O-methylguanosine-3'-phosphate
  modified_base 18: mod_base = OTHER; note = 2'-O-methylguanosine-3'-phosphate
  modified_base 19: mod_base = OTHER; note = 2'-O-methyladenosine-3'-phosphate
  modified_base 20: mod_base = OTHER; note = 2'-O-methylcytidine-3'-phosphate
  modified_base 21: mod_base = OTHER; note = 2'-O-methylguanosine-3'- phosphorothioate
  modified_base 22: mod_base = OTHER; note = 2'-O-methylcytidine-3'- phosphorothioate
  modified_base 23: mod_base = OTHER; note = 2'-O-methylguanosine-3'-phosphate
  misc_feature 1: note = RNA
  misc_feature 2: note = DNA
  misc_feature 3..4: note = RNA
  misc_feature 5: note = DNA
  misc_feature 6: note = RNA
  misc_feature 7: note = DNA
  misc_feature 8..11: note = RNA
  misc_feature 12: note = DNA
  misc_feature 13..23: note = RNA
taagaaatctcccattggacgcg

SEQ ID NO: 1152 - DNA, 23 bp, synthetic construct
  source 1..23: mol_type = other DNA
  modified_base 1: mod_base = OTHER; note = Vinyl-phosphonate 2'-O-methyluridine-3'-phosphorothioate
  modified_base 2: mod_base = OTHER; note = 2'-fluoroguanosine-3'-phosphorothioate
  modified_base 3: mod_base = OTHER; note = 2'-O-methyladenosine-3'-phosphate
  modified_base 4: mod_base = OTHER; note = 2'-O-methylguanosine-3'-phosphate
  modified_base 6: mod_base = OTHER; note = 2'-O-methylcytidine-3'-phosphate
  modified_base 7: mod_base = OTHER; note = Thymidine-glycol nucleic acid (GNA) S-Isomer
  modified_base 8: mod_base = OTHER; note = 2'-O-methylcytidine-3'-phosphate
  modified_base 9: mod_base = OTHER; note = 2'-O-methyladenosine-3'-phosphate
  modified_base 10: mod_base = OTHER; note = 2'-O-methyladenosine-3'-phosphate
  modified_base 11: mod_base = OTHER; note = 2'-O-methyladenosine-3'-phosphate
  modified_base 12: mod_base = OTHER; note = 2'-O-methyluridine-3'-phosphate
  modified_base 13: mod_base = OTHER; note = 2'-O-methylcytidine-3'-phosphate
  modified_base 14: mod_base = OTHER; note = 2'-fluorouridine-3'-phosphate
  modified_base 15: mod_base = OTHER; note = 2'-O-methylcytidine-3'-phosphate
  modified_base 16: mod_base = OTHER; note = 2'-fluoroadenosine-3'-phosphate
  modified_base 17: mod_base = OTHER; note = 2'-O-methylguanosine-3'-phosphate
  modified_base 18: mod_base = OTHER; note = 2'-O-methylguanosine-3'-phosphate
  modified_base 19: mod_base = OTHER; note = 2'-O-methylcytidine-3'-phosphate
  modified_base 20: mod_base = OTHER; note = 2'-O-methyluridine-3'-phosphate
  modified_base 21: mod_base = OTHER; note = 2'-O-methylguanosine-3'- phosphorothioate
  modified_base 22: mod_base = OTHER; note = 2'-O-methyluridine-3'-phosphorothioate
  modified_base 23: mod_base = OTHER; note = 2'-O-methyluridine-3'-phosphate
  misc_feature 1..4: note = RNA
  misc_feature 5: note = DNA
  misc_feature 6: note = RNA
  misc_feature 7: note = DNA
  misc_feature 8..23: note = RNA
tgagcctcaaatctcaggctgtt

SEQ ID NO: 1153 - DNA, 23 bp, synthetic construct
  source 1..23: mol_type = other DNA
  modified_base 1: mod_base = OTHER; note = Vinyl-phosphonate 2'-O-methyluridine-3'-phosphorothioate
  modified_base 2: mod_base = OTHER; note = 2'-fluoroguanosine-3'-phosphorothioate
  modified_base 3: mod_base = OTHER; note = 2'-O-methylguanosine-3'-phosphate
  modified_base 4: mod_base = OTHER; note = 2'-O-methyladenosine-3'-phosphate
  modified_base 6: mod_base = OTHER; note = 2'-O-methylguanosine-3'-phosphate
  modified_base 7: mod_base = OTHER; note = Adenosine-glycol nucleic acid (GNA) S-Isomer
  modified_base 8: mod_base = OTHER; note = 2'-O-methylguanosine-3'-phosphate
  modified_base 9: mod_base = OTHER; note = 2'-O-methylcytidine-3'-phosphate
  modified_base 10: mod_base = OTHER; note = 2'-O-methylcytidine-3'-phosphate
  modified_base 11: mod_base = OTHER; note = 2'-O-methyluridine-3'-phosphate
  modified_base 12: mod_base = OTHER; note = 2'-O-methylcytidine-3'-phosphate
  modified_base 13: mod_base = OTHER; note = 2'-O-methyladenosine-3'-phosphate
  modified_base 14: mod_base = OTHER; note = 2'-fluoroadenosine-3'-phosphate
  modified_base 15: mod_base = OTHER; note = 2'-O-methyladenosine-3'-phosphate
  modified_base 16: mod_base = OTHER; note = 2'-fluorouridine-3'-phosphate
  modified_base 17: mod_base = OTHER; note = 2'-O-methylcytidine-3'-phosphate
  modified_base 18: mod_base = OTHER; note = 2'-O-methyluridine-3'-phosphate
  modified_base 19: mod_base = OTHER; note = 2'-O-methylcytidine-3'-phosphate
  modified_base 20: mod_base = OTHER; note = 2'-O-methyladenosine-3'-phosphate
  modified_base 21: mod_base = OTHER; note = 2'-O-methylguanosine-3'- phosphorothioate
  modified_base 22: mod_base = OTHER; note = 2'-O-methylguanosine-3'- phosphorothioate
  modified_base 23: mod_base = OTHER; note = 2'-O-methylcytidine-3'-phosphate
  misc_feature 1..4: note = RNA
  misc_feature 5: note = DNA
  misc_feature 6..23: note = RNA
tggaagagcctcaaatctcaggc

SEQ ID NO: 1154 - RNA, 23 nt, synthetic construct
  source 1..23: mol_type = other RNA
  modified_base 1: mod_base = OTHER; note = Vinyl-phosphonate 2'-O-methyluridine-3'-phosphorothioate
  modified_base 2: mod_base = OTHER; note = 2'-fluoroadenosine-3'-phosphorothioate
  modified_base 3: mod_base = OTHER; note = 2'-O-methylguanosine-3'-phosphate
  modified_base 4: mod_base = OTHER; note = 2'-O-methylguanosine-3'-phosphate
  modified_base 5: mod_base = OTHER; note = 2'-O-methyladenosine-3'-phosphate
  modified_base 6: mod_base = OTHER; note = 2'-fluoroadenosine-3'-phosphate
  modified_base 7: mod_base = OTHER; note = 2'-O-methylguanosine-3'-phosphate
  modified_base 8: mod_base = OTHER; note = 2'-fluoroadenosine-3'-phosphate
  modified_base 9: mod_base = OTHER; note = 2'-fluoroguanosine-3'-phosphate
  modified_base 10: mod_base = OTHER; note = 2'-O-methylcytidine-3'-phosphate
  modified_base 11: mod_base = OTHER; note = 2'-O-methylcytidine-3'-phosphate
  modified_base 12: mod_base = OTHER; note = 2'-O-methyluridine-3'-phosphate
  modified_base 13: mod_base = OTHER; note = 2'-O-methylcytidine-3'-phosphate
  modified_base 14: mod_base = OTHER; note = 2'-fluoroadenosine-3'-phosphate
  modified_base 15: mod_base = OTHER; note = 2'-O-methyladenosine-3'-phosphate
  modified_base 16: mod_base = OTHER; note = 2'-fluoroadenosine-3'-phosphate
  modified_base 17: mod_base = OTHER; note = 2'-O-methyluridine-3'-phosphate
  modified_base 18: mod_base = OTHER; note = 2'-O-methylcytidine-3'-phosphate
  modified_base 19: mod_base = OTHER; note = 2'-O-methyluridine-3'-phosphate
  modified_base 20: mod_base = OTHER; note = 2'-O-methylcytidine-3'-phosphate
  modified_base 21: mod_base = OTHER; note = 2'-O-methyladenosine-3'- phosphorothioate
  modified_base 22: mod_base = OTHER; note = 2'-O-methylguanosine-3'- phosphorothioate
  modified_base 23: mod_base = OTHER; note = 2'-O-methylguanosine-3'-phosphate
taggaagagcctcaaatctcagg

SEQ ID NO: 1155 - DNA, 23 bp, synthetic construct
  source 1..23: mol_type = other DNA
  modified_base 1: mod_base = OTHER; note = Vinyl-phosphonate 2'-O-methyluridine-3'-phosphorothioate
  modified_base 2: mod_base = OTHER; note = 2'-deoxyadenosine-3'-phosphorothioate
  modified_base 3: mod_base = OTHER; note = 2'-O-methylguanosine-3'-phosphate
  modified_base 4: mod_base = OTHER; note = 2'-O-methylguanosine-3'-phosphate
  modified_base 6: mod_base = OTHER; note = 2'-O-methyladenosine-3'-phosphate
  modified_base 8: mod_base = OTHER; note = 2'-O-methyladenosine-3'-phosphate
  modified_base 9: mod_base = OTHER; note = 2'-O-methylguanosine-3'-phosphate
  modified_base 10: mod_base = OTHER; note = 2'-O-methylcytidine-3'-phosphate
  modified_base 11: mod_base = OTHER; note = 2'-O-methylcytidine-3'-phosphate
  modified_base 13: mod_base = OTHER; note = 2'-O-methylcytidine-3'-phosphate
  modified_base 14: mod_base = OTHER; note = 2'-fluoroadenosine-3'-phosphate
  modified_base 15: mod_base = OTHER; note = 2'-O-methyladenosine-3'-phosphate
  modified_base 16: mod_base = OTHER; note = 2'-O-methyladenosine-3'-phosphate
  modified_base 17: mod_base = OTHER; note = 2'-O-methyluridine-3'-phosphate
  modified_base 18: mod_base = OTHER; note = 2'-O-methylcytidine-3'-phosphate
  modified_base 19: mod_base = OTHER; note = 2'-O-methyluridine-3'-phosphate
  modified_base 20: mod_base = OTHER; note = 2'-O-methylcytidine-3'-phosphate
  modified_base 21: mod_base = OTHER; note = 2'-O-methyladenosine-3'- phosphorothioate
  modified_base 22: mod_base = OTHER; note = 2'-O-methylguanosine-3'- phosphorothioate
  modified_base 23: mod_base = OTHER; note = 2'-O-methylguanosine-3'-phosphate
  misc_feature 1: note = RNA
  misc_feature 2: note = DNA
  misc_feature 3..4: note = RNA
  misc_feature 5: note = DNA
  misc_feature 6: note = RNA
  misc_feature 7: note = DNA
  misc_feature 8..11: note = RNA
  misc_feature 12: note = DNA
  misc_feature 13..23: note = RNA
taggaagagcctcaaatctcagg

SEQ ID NO: 1156 - DNA, 23 bp, synthetic construct
  source 1..23: mol_type = other DNA
  modified_base 1: mod_base = OTHER; note = Vinyl-phosphonate 2'-O-methyluridine-3'-phosphorothioate
  modified_base 2: mod_base = OTHER; note = 2'-fluorouridine -3'-phosphorothioate
  modified_base 3: mod_base = OTHER; note = 2'-O-methyladenosine-3'-phosphate
  modified_base 4: mod_base = OTHER; note = 2'-O-methylguanosine-3'-phosphate
  modified_base 6: mod_base = OTHER; note = 2'-O-methyladenosine-3'-phosphate
  modified_base 7: mod_base = OTHER; note = Adenosine-glycol nucleic acid (GNA) S-Isomer
  modified_base 8: mod_base = OTHER; note = 2'-O-methylguanosine-3'-phosphate
  modified_base 9: mod_base = OTHER; note = 2'-O-methyladenosine-3'-phosphate
  modified_base 10: mod_base = OTHER; note = 2'-O-methylguanosine-3'-phosphate
  modified_base 11: mod_base = OTHER; note = 2'-O-methylcytidine-3'-phosphate
  modified_base 12: mod_base = OTHER; note = 2'-O-methylcytidine-3'-phosphate
  modified_base 13: mod_base = OTHER; note = 2'-O-methyluridine-3'-phosphate
  modified_base 14: mod_base = OTHER; note = 2'-fluorocytidine-3'-phosphate
  modified_base 15: mod_base = OTHER; note = 2'-O-methyladenosine-3'-phosphate
  modified_base 16: mod_base = OTHER; note = 2'-fluoroadenosine-3'-phosphate
  modified_base 17: mod_base = OTHER; note = 2'-O-methyladenosine-3'-phosphate
  modified_base 18: mod_base = OTHER; note = 2'-O-methyluridine-3'-phosphate
  modified_base 19: mod_base = OTHER; note = 2'-O-methylcytidine-3'-phosphate
  modified_base 20: mod_base = OTHER; note = 2'-O-methyluridine-3'-phosphate
  modified_base 21: mod_base = OTHER; note = 2'-O-methylcytidine-3'- phosphorothioate
  modified_base 22: mod_base = OTHER; note = 2'-O-methyladenosine-3'- phosphorothioate
  modified_base 23: mod_base = OTHER; note = 2'-O-methylguanosine-3'-phosphate
  misc_feature 1..4: note = RNA
  misc_feature 5: note = DNA
  misc_feature 6..23: note = RNA
ttaggaagagcctcaaatctcag

SEQ ID NO: 1157 - RNA, 23 nt, synthetic construct
  source 1..23: mol_type = other RNA
  modified_base 1: mod_base = OTHER; note = Vinyl-phosphonate 2'-O-methyluridine-3'-phosphorothioate
  modified_base 2: mod_base = OTHER; note = 2'-fluorouridine -3'-phosphorothioate
  modified_base 3: mod_base = OTHER; note = 2'-O-methyladenosine-3'-phosphate
  modified_base 4: mod_base = OTHER; note = 2'-O-methylguanosine-3'-phosphate
  modified_base 5: mod_base = OTHER; note = 2'-O-methylguanosine-3'-phosphate
  modified_base 6: mod_base = OTHER; note = 2'-fluoroadenosine-3'-phosphate
  modified_base 7: mod_base = OTHER; note = 2'-O-methyladenosine-3'-phosphate
  modified_base 8: mod_base = OTHER; note = 2'-fluoroguanosine-3'-phosphate
  modified_base 9: mod_base = OTHER; note = 2'-fluoroadenosine-3'-phosphate
  modified_base 10: mod_base = OTHER; note = 2'-O-methylguanosine-3'-phosphate
  modified_base 11: mod_base = OTHER; note = 2'-O-methylcytidine-3'-phosphate
  modified_base 12: mod_base = OTHER; note = 2'-O-methylcytidine-3'-phosphate
  modified_base 13: mod_base = OTHER; note = 2'-O-methyluridine-3'-phosphate
  modified_base 14: mod_base = OTHER; note = 2'-fluorocytidine-3'-phosphate
  modified_base 15: mod_base = OTHER; note = 2'-O-methyladenosine-3'-phosphate
  modified_base 16: mod_base = OTHER; note = 2'-fluoroadenosine-3'-phosphate
  modified_base 17: mod_base = OTHER; note = 2'-O-methyladenosine-3'-phosphate
  modified_base 18: mod_base = OTHER; note = 2'-O-methyluridine-3'-phosphate
  modified_base 19: mod_base = OTHER; note = 2'-O-methylcytidine-3'-phosphate
  modified_base 20: mod_base = OTHER; note = 2'-O-methyluridine-3'-phosphate
  modified_base 21: mod_base = OTHER; note = 2'-O-methylcytidine-3'- phosphorothioate
  modified_base 22: mod_base = OTHER; note = 2'-O-methyladenosine-3'- phosphorothioate
  modified_base 23: mod_base = OTHER; note = 2'-O-methylguanosine-3'-phosphate
ttaggaagagcctcaaatctcag

SEQ ID NO: 1158 - DNA, 23 bp, synthetic construct
  source 1..23: mol_type = other DNA
  modified_base 1: mod_base = OTHER; note = Vinyl-phosphonate 2'-O-methyluridine-3'-phosphorothioate
  modified_base 2: mod_base = OTHER; note = 2'-deoxythymidine-3'-phosphorothioate
  modified_base 3: mod_base = OTHER; note = 2'-O-methyladenosine-3'-phosphate
  modified_base 4: mod_base = OTHER; note = 2'-O-methylguanosine-3'-phosphate
  modified_base 6: mod_base = OTHER; note = 2'-O-methyladenosine-3'-phosphate
  modified_base 8: mod_base = OTHER; note = 2'-O-methylguanosine-3'-phosphate
  modified_base 9: mod_base = OTHER; note = 2'-O-methyladenosine-3'-phosphate
  modified_base 10: mod_base = OTHER; note = 2'-O-methylguanosine-3'-phosphate
  modified_base 11: mod_base = OTHER; note = 2'-O-methylcytidine-3'-phosphate
  modified_base 13: mod_base = OTHER; note = 2'-O-methyluridine-3'-phosphate
  modified_base 14: mod_base = OTHER; note = 2'-fluorocytidine-3'-phosphate
  modified_base 15: mod_base = OTHER; note = 2'-O-methyladenosine-3'-phosphate
  modified_base 16: mod_base = OTHER; note = 2'-O-methyladenosine-3'-phosphate
  modified_base 17: mod_base = OTHER; note = 2'-O-methyladenosine-3'-phosphate
  modified_base 18: mod_base = OTHER; note = 2'-O-methyluridine-3'-phosphate
  modified_base 19: mod_base = OTHER; note = 2'-O-methylcytidine-3'-phosphate
  modified_base 20: mod_base = OTHER; note = 2'-O-methyluridine-3'-phosphate
  modified_base 21: mod_base = OTHER; note = 2'-O-methylcytidine-3'- phosphorothioate
  modified_base 22: mod_base = OTHER; note = 2'-O-methyladenosine-3'- phosphorothioate
  modified_base 23: mod_base = OTHER; note = 2'-O-methylguanosine-3'-phosphate
  misc_feature 1: note = RNA
  misc_feature 2: note = DNA
  misc_feature 3..4: note = RNA
  misc_feature 5: note = DNA
  misc_feature 6: note = RNA
  misc_feature 7: note = DNA
  misc_feature 8..11: note = RNA
  misc_feature 12: note = DNA
  misc_feature 13..23: note = RNA
ttaggaagagcctcaaatctcag

SEQ ID NO: 1159 - DNA, 23 bp, synthetic construct
  source 1..23: mol_type = other DNA
  modified_base 1: mod_base = OTHER; note = Vinyl-phosphonate 2'-O-methyluridine-3'-phosphorothioate
  modified_base 2: mod_base = OTHER; note = 2'-fluoroguanosine-3'-phosphorothioate
  modified_base 3: mod_base = OTHER; note = 2'-O-methyluridine-3'-phosphate
  modified_base 4: mod_base = OTHER; note = 2'-O-methyladenosine-3'-phosphate
  modified_base 6: mod_base = OTHER; note = 2'-O-methylguanosine-3'-phosphate
  modified_base 7: mod_base = OTHER; note = Adenosine-glycol nucleic acid (GNA) S-Isomer
  modified_base 8: mod_base = OTHER; note = 2'-O-methyladenosine-3'-phosphate
  modified_base 9: mod_base = OTHER; note = 2'-O-methylguanosine-3'-phosphate
  modified_base 10: mod_base = OTHER; note = 2'-O-methyladenosine-3'-phosphate
  modified_base 11: mod_base = OTHER; note = 2'-O-methylguanosine-3'-phosphate
  modified_base 12: mod_base = OTHER; note = 2'-O-methylcytidine-3'-phosphate
  modified_base 13: mod_base = OTHER; note = 2'-O-methylcytidine-3'-phosphate
  modified_base 14: mod_base = OTHER; note = 2'-fluorouridine-3'-phosphate
  modified_base 15: mod_base = OTHER; note = 2'-O-methylcytidine-3'-phosphate
  modified_base 16: mod_base = OTHER; note = 2'-fluoroadenosine-3'-phosphate
  modified_base 17: mod_base = OTHER; note = 2'-O-methyladenosine-3'-phosphate
  modified_base 18: mod_base = OTHER; note = 2'-O-methyladenosine-3'-phosphate
  modified_base 19: mod_base = OTHER; note = 2'-O-methyluridine-3'-phosphate
  modified_base 20: mod_base = OTHER; note = 2'-O-methylcytidine-3'-phosphate
  modified_base 21: mod_base = OTHER; note = 2'-O-methyluridine-3'-phosphorothioate
  modified_base 22: mod_base = OTHER; note = 2'-O-methylcytidine-3'- phosphorothioate
  modified_base 23: mod_base = OTHER; note = 2'-O-methyladenosine-3'-phosphate
  misc_feature 1..4: note = RNA
  misc_feature 5: note = DNA
  misc_feature 6..23: note = RNA
tgtaggaagagcctcaaatctca

SEQ ID NO: 1160 - DNA, 23 bp, synthetic construct
  source 1..23: mol_type = other DNA
  modified_base 1: mod_base = OTHER; note = Vinyl-phosphonate 2'-O-methyluridine-3'-phosphorothioate
  modified_base 2: mod_base = OTHER; note = 2'-fluoroadenosine-3'-phosphorothioate
  modified_base 3: mod_base = OTHER; note = 2'-O-methyladenosine-3'-phosphate
  modified_base 4: mod_base = OTHER; note = 2'-O-methyluridine-3'-phosphate
  modified_base 6: mod_base = OTHER; note = 2'-O-methyluridine-3'-phosphate
  modified_base 7: mod_base = OTHER; note = Adenosine-glycol nucleic acid (GNA) S-Isomer
  modified_base 8: mod_base = OTHER; note = 2'-O-methylguanosine-3'-phosphate
  modified_base 9: mod_base = OTHER; note = 2'-O-methylguanosine-3'-phosphate
  modified_base 10: mod_base = OTHER; note = 2'-O-methyladenosine-3'-phosphate
  modified_base 11: mod_base = OTHER; note = 2'-O-methyladenosine-3'-phosphate
  modified_base 12: mod_base = OTHER; note = 2'-O-methylguanosine-3'-phosphate
  modified_base 13: mod_base = OTHER; note = 2'-O-methyladenosine-3'-phosphate
  modified_base 14: mod_base = OTHER; note = 2'-fluoroguanosine-3'-phosphate
  modified_base 15: mod_base = OTHER; note = 2'-O-methylcytidine-3'-phosphate
  modified_base 16: mod_base = OTHER; note = 2'-fluorocytidine-3'-phosphate
  modified_base 17: mod_base = OTHER; note = 2'-O-methyluridine-3'-phosphate
  modified_base 18: mod_base = OTHER; note = 2'-O-methylcytidine-3'-phosphate
  modified_base 19: mod_base = OTHER; note = 2'-O-methyladenosine-3'-phosphate
  modified_base 20: mod_base = OTHER; note = 2'-O-methyladenosine-3'-phosphate
  modified_base 21: mod_base = OTHER; note = 2'-O-methyladenosine-3'- phosphorothioate
  modified_base 22: mod_base = OTHER; note = 2'-O-methyluridine-3'-phosphorothioate
  modified_base 23: mod_base = OTHER; note = 2'-O-methylcytidine-3'-phosphate
  misc_feature 1..4: note = RNA
  misc_feature 5: note = DNA
  misc_feature 6..23: note = RNA
taatgtaggaagagcctcaaatc

SEQ ID NO: 1161 - RNA, 23 nt, synthetic construct
  source 1..23: mol_type = other RNA
  modified_base 1: mod_base = OTHER; note = Vinyl-phosphonate 2'-O-methyluridine-3'-phosphorothioate
  modified_base 2: mod_base = OTHER; note = 2'-fluoroadenosine-3'-phosphorothioate
  modified_base 3: mod_base = OTHER; note = 2'-O-methylcytidine-3'-phosphate
  modified_base 4: mod_base = OTHER; note = 2'-O-methyladenosine-3'-phosphate
  modified_base 5: mod_base = OTHER; note = 2'-O-methyladenosine-3'-phosphate
  modified_base 6: mod_base = OTHER; note = 2'-fluorouridine-3'-phosphate
  modified_base 7: mod_base = OTHER; note = 2'-O-methylguanosine-3'-phosphate
  modified_base 8: mod_base = OTHER; note = 2'-fluorouridine-3'-phosphate
  modified_base 9: mod_base = OTHER; note = 2'-fluoroadenosine-3'-phosphate
  modified_base 10: mod_base = OTHER; note = 2'-O-methylguanosine-3'-phosphate
  modified_base 11: mod_base = OTHER; note = 2'-O-methylguanosine-3'-phosphate
  modified_base 12: mod_base = OTHER; note = 2'-O-methyladenosine-3'-phosphate
  modified_base 13: mod_base = OTHER; note = 2'-O-methyladenosine-3'-phosphate
  modified_base 14: mod_base = OTHER; note = 2'-fluoroguanosine-3'-phosphate
  modified_base 15: mod_base = OTHER; note = 2'-O-methyladenosine-3'-phosphate
  modified_base 16: mod_base = OTHER; note = 2'-fluoroguanosine-3'-phosphate
  modified_base 17: mod_base = OTHER; note = 2'-O-methylcytidine-3'-phosphate
  modified_base 18: mod_base = OTHER; note = 2'-O-methylcytidine-3'-phosphate
  modified_base 19: mod_base = OTHER; note = 2'-O-methyluridine-3'-phosphate
  modified_base 20: mod_base = OTHER; note = 2'-O-methylcytidine-3'-phosphate
  modified_base 21: mod_base = OTHER; note = 2'-O-methyladenosine-3'- phosphorothioate
  modified_base 22: mod_base = OTHER; note = 2'-O-methyladenosine-3'- phosphorothioate
  modified_base 23: mod_base = OTHER; note = 2'-O-methyladenosine-3'-phosphate
tacaatgtaggaagagcctcaaa

SEQ ID NO: 1162 - DNA, 23 bp, synthetic construct
  source 1..23: mol_type = other DNA
  modified_base 1: mod_base = OTHER; note = Vinyl-phosphonate 2'-O-methyluridine-3'-phosphorothioate
  modified_base 2: mod_base = OTHER; note = 2'-deoxyadenosine-3'-phosphorothioate
  modified_base 3: mod_base = OTHER; note = 2'-O-methylcytidine-3'-phosphate
  modified_base 4: mod_base = OTHER; note = 2'-O-methyladenosine-3'-phosphate
  modified_base 6: mod_base = OTHER; note = 2'-O-methyluridine-3'-phosphate
  modified_base 8: mod_base = OTHER; note = 2'-O-methyluridine-3'-phosphate
  modified_base 9: mod_base = OTHER; note = 2'-O-methyladenosine-3'-phosphate
  modified_base 10: mod_base = OTHER; note = 2'-O-methylguanosine-3'-phosphate
  modified_base 11: mod_base = OTHER; note = 2'-O-methylguanosine-3'-phosphate
  modified_base 13: mod_base = OTHER; note = 2'-O-methyladenosine-3'-phosphate
  modified_base 14: mod_base = OTHER; note = 2'-fluoroguanosine-3'-phosphate
  modified_base 15: mod_base = OTHER; note = 2'-O-methyladenosine-3'-phosphate
  modified_base 16: mod_base = OTHER; note = 2'-O-methylguanosine-3'-phosphate
  modified_base 17: mod_base = OTHER; note = 2'-O-methylcytidine-3'-phosphate
  modified_base 18: mod_base = OTHER; note = 2'-O-methylcytidine-3'-phosphate
  modified_base 19: mod_base = OTHER; note = 2'-O-methyluridine-3'-phosphate
  modified_base 20: mod_base = OTHER; note = 2'-O-methylcytidine-3'-phosphate
  modified_base 21: mod_base = OTHER; note = 2'-O-methyladenosine-3'- phosphorothioate
  modified_base 22: mod_base = OTHER; note = 2'-O-methyladenosine-3'- phosphorothioate
  modified_base 23: mod_base = OTHER; note = 2'-O-methyladenosine-3'-phosphate
  misc_feature 1: note = RNA
  misc_feature 2: note = DNA
  misc_feature 3..4: note = RNA
  misc_feature 5: note = DNA
  misc_feature 6: note = RNA
  misc_feature 7: note = DNA
  misc_feature 8..11: note = RNA
  misc_feature 12: note = DNA
  misc_feature 13..23: note = RNA
tacaatgtaggaagagcctcaaa

SEQ ID NO: 1163 - RNA, 23 nt, synthetic construct
  source 1..23: mol_type = other RNA
  modified_base 1: mod_base = OTHER; note = Vinyl-phosphonate 2'-O-methyluridine-3'-phosphorothioate
  modified_base 2: mod_base = OTHER; note = 2'-fluoroguanosine-3'-phosphorothioate
  modified_base 3: mod_base = OTHER; note = 2'-O-methyladenosine-3'-phosphate
  modified_base 4: mod_base = OTHER; note = 2'-O-methylcytidine-3'-phosphate
  modified_base 5: mod_base = OTHER; note = 2'-O-methyladenosine-3'-phosphate
  modified_base 6: mod_base = OTHER; note = 2'-fluoroadenosine-3'-phosphate
  modified_base 7: mod_base = OTHER; note = 2'-O-methyluridine-3'-phosphate
  modified_base 8: mod_base = OTHER; note = 2'-fluoroguanosine-3'-phosphate
  modified_base 9: mod_base = OTHER; note = 2'-fluorouridine-3'-phosphate
  modified_base 10: mod_base = OTHER; note = 2'-O-methyladenosine-3'-phosphate
  modified_base 11: mod_base = OTHER; note = 2'-O-methylguanosine-3'-phosphate
  modified_base 12: mod_base = OTHER; note = 2'-O-methylguanosine-3'-phosphate
  modified_base 13: mod_base = OTHER; note = 2'-O-methyladenosine-3'-phosphate
  modified_base 14: mod_base = OTHER; note = 2'-fluoroadenosine-3'-phosphate
  modified_base 15: mod_base = OTHER; note = 2'-O-methylguanosine-3'-phosphate
  modified_base 16: mod_base = OTHER; note = 2'-fluoroadenosine-3'-phosphate
  modified_base 17: mod_base = OTHER; note = 2'-O-methylguanosine-3'-phosphate
  modified_base 18: mod_base = OTHER; note = 2'-O-methylcytidine-3'-phosphate
  modified_base 19: mod_base = OTHER; note = 2'-O-methylcytidine-3'-phosphate
  modified_base 20: mod_base = OTHER; note = 2'-O-methyluridine-3'-phosphate
  modified_base 21: mod_base = OTHER; note = 2'-O-methylcytidine-3'- phosphorothioate
  modified_base 22: mod_base = OTHER; note = 2'-O-methyladenosine-3'- phosphorothioate
  modified_base 23: mod_base = OTHER; note = 2'-O-methyladenosine-3'-phosphate
tgacaatgtaggaagagcctcaa

SEQ ID NO: 1164 - DNA, 23 bp, synthetic construct
  source 1..23: mol_type = other DNA
  modified_base 1: mod_base = OTHER; note = Vinyl-phosphonate 2'-O-methyluridine-3'-phosphorothioate
  modified_base 2: mod_base = OTHER; note = 2'-deoxyguanosine-3'-phosphorothioate
  modified_base 3: mod_base = OTHER; note = 2'-O-methyladenosine-3'-phosphate
  modified_base 4: mod_base = OTHER; note = 2'-O-methylcytidine-3'-phosphate
  modified_base 6: mod_base = OTHER; note = 2'-O-methyladenosine-3'-phosphate
  modified_base 8: mod_base = OTHER; note = 2'-O-methylguanosine-3'-phosphate
  modified_base 9: mod_base = OTHER; note = 2'-O-methyluridine-3'-phosphate
  modified_base 10: mod_base = OTHER; note = 2'-O-methyladenosine-3'-phosphate
  modified_base 11: mod_base = OTHER; note = 2'-O-methylguanosine-3'-phosphate
  modified_base 13: mod_base = OTHER; note = 2'-O-methyladenosine-3'-phosphate
  modified_base 14: mod_base = OTHER; note = 2'-fluoroadenosine-3'-phosphate
  modified_base 15: mod_base = OTHER; note = 2'-O-methylguanosine-3'-phosphate
  modified_base 16: mod_base = OTHER; note = 2'-O-methyladenosine-3'-phosphate
  modified_base 17: mod_base = OTHER; note = 2'-O-methylguanosine-3'-phosphate
  modified_base 18: mod_base = OTHER; note = 2'-O-methylcytidine-3'-phosphate
  modified_base 19: mod_base = OTHER; note = 2'-O-methylcytidine-3'-phosphate
  modified_base 20: mod_base = OTHER; note = 2'-O-methyluridine-3'-phosphate
  modified_base 21: mod_base = OTHER; note = 2'-O-methylcytidine-3'- phosphorothioate
  modified_base 22: mod_base = OTHER; note = 2'-O-methyladenosine-3'- phosphorothioate
  modified_base 23: mod_base = OTHER; note = 2'-O-methyladenosine-3'-phosphate
  misc_feature 1: note = RNA
  misc_feature 2: note = DNA
  misc_feature 3..4: note = RNA
  misc_feature 5: note = DNA
  misc_feature 6: note = RNA
  misc_feature 7: note = DNA
  misc_feature 8..11: note = RNA
  misc_feature 12: note = DNA
  misc_feature 13..23: note = RNA
tgacaatgtaggaagagcctcaa

SEQ ID NO: 1165 - DNA, 23 bp, synthetic construct
  source 1..23: mol_type = other DNA
  modified_base 1: mod_base = OTHER; note = Vinyl-phosphonate 2'-O-methyluridine-3'-phosphorothioate
  modified_base 2: mod_base = OTHER; note = 2'-fluorouridine -3'-phosphorothioate
  modified_base 3: mod_base = OTHER; note = 2'-O-methylguanosine-3'-phosphate
  modified_base 4: mod_base = OTHER; note = 2'-O-methyladenosine-3'-phosphate
  modified_base 6: mod_base = OTHER; note = 2'-O-methyladenosine-3'-phosphate
  modified_base 7: mod_base = OTHER; note = Adenosine-glycol nucleic acid (GNA) S-Isomer
  modified_base 8: mod_base = OTHER; note = 2'-O-methyluridine-3'-phosphate
  modified_base 9: mod_base = OTHER; note = 2'-O-methylguanosine-3'-phosphate
  modified_base 10: mod_base = OTHER; note = 2'-O-methyluridine-3'-phosphate
  modified_base 11: mod_base = OTHER; note = 2'-O-methyladenosine-3'-phosphate
  modified_base 12: mod_base = OTHER; note = 2'-O-methylguanosine-3'-phosphate
  modified_base 13: mod_base = OTHER; note = 2'-O-methylguanosine-3'-phosphate
  modified_base 14: mod_base = OTHER; note = 2'-fluoroadenosine-3'-phosphate
  modified_base 15: mod_base = OTHER; note = 2'-O-methyladenosine-3'-phosphate
  modified_base 16: mod_base = OTHER; note = 2'-fluoroguanosine-3'-phosphate
  modified_base 17: mod_base = OTHER; note = 2'-O-methyladenosine-3'-phosphate
  modified_base 18: mod_base = OTHER; note = 2'-O-methylguanosine-3'-phosphate
  modified_base 19: mod_base = OTHER; note = 2'-O-methylcytidine-3'-phosphate
  modified_base 20: mod_base = OTHER; note = 2'-O-methylcytidine-3'-phosphate
  modified_base 21: mod_base = OTHER; note = 2'-O-methyluridine-3'-phosphorothioate
  modified_base 22: mod_base = OTHER; note = 2'-O-methylcytidine-3'- phosphorothioate
  modified_base 23: mod_base = OTHER; note = 2'-O-methyladenosine-3'-phosphate
  misc_feature 1..4: note = RNA
  misc_feature 5: note = DNA
  misc_feature 6..23: note = RNA
ttgacaatgtaggaagagcctca

SEQ ID NO: 1166 - RNA, 23 nt, synthetic construct
  source 1..23: mol_type = other RNA
  modified_base 1: mod_base = OTHER; note = Vinyl-phosphonate 2'-O-methyluridine-3'-phosphorothioate
  modified_base 2: mod_base = OTHER; note = 2'-fluorouridine -3'-phosphorothioate
  modified_base 3: mod_base = OTHER; note = 2'-O-methylguanosine-3'-phosphate
  modified_base 4: mod_base = OTHER; note = 2'-O-methyladenosine-3'-phosphate
  modified_base 5: mod_base = OTHER; note = 2'-O-methylcytidine-3'-phosphate
  modified_base 6: mod_base = OTHER; note = 2'-fluoroadenosine-3'-phosphate
  modified_base 7: mod_base = OTHER; note = 2'-O-methyladenosine-3'-phosphate
  modified_base 8: mod_base = OTHER; note = 2'-fluorouridine-3'-phosphate
  modified_base 9: mod_base = OTHER; note = 2'-fluoroguanosine-3'-phosphate
  modified_base 10: mod_base = OTHER; note = 2'-O-methyluridine-3'-phosphate
  modified_base 11: mod_base = OTHER; note = 2'-O-methyladenosine-3'-phosphate
  modified_base 12: mod_base = OTHER; note = 2'-O-methylguanosine-3'-phosphate
  modified_base 13: mod_base = OTHER; note = 2'-O-methylguanosine-3'-phosphate
  modified_base 14: mod_base = OTHER; note = 2'-fluoroadenosine-3'-phosphate
  modified_base 15: mod_base = OTHER; note = 2'-O-methyladenosine-3'-phosphate
  modified_base 16: mod_base = OTHER; note = 2'-fluoroguanosine-3'-phosphate
  modified_base 17: mod_base = OTHER; note = 2'-O-methyladenosine-3'-phosphate
  modified_base 18: mod_base = OTHER; note = 2'-O-methylguanosine-3'-phosphate
  modified_base 19: mod_base = OTHER; note = 2'-O-methylcytidine-3'-phosphate
  modified_base 20: mod_base = OTHER; note = 2'-O-methylcytidine-3'-phosphate
  modified_base 21: mod_base = OTHER; note = 2'-O-methyluridine-3'-phosphorothioate
  modified_base 22: mod_base = OTHER; note = 2'-O-methylcytidine-3'- phosphorothioate
  modified_base 23: mod_base = OTHER; note = 2'-O-methyladenosine-3'-phosphate
ttgacaatgtaggaagagcctca

SEQ ID NO: 1167 - DNA, 23 bp, synthetic construct
  source 1..23: mol_type = other DNA
  modified_base 1: mod_base = OTHER; note = Vinyl-phosphonate 2'-O-methyluridine-3'-phosphorothioate
  modified_base 2: mod_base = OTHER; note = 2'-deoxythymidine-3'-phosphorothioate
  modified_base 3: mod_base = OTHER; note = 2'-O-methylguanosine-3'-phosphate
  modified_base 4: mod_base = OTHER; note = 2'-O-methyladenosine-3'-phosphate
  modified_base 6: mod_base = OTHER; note = 2'-O-methyladenosine-3'-phosphate
  modified_base 8: mod_base = OTHER; note = 2'-O-methyluridine-3'-phosphate
  modified_base 9: mod_base = OTHER; note = 2'-O-methylguanosine-3'-phosphate
  modified_base 10: mod_base = OTHER; note = 2'-O-methyluridine-3'-phosphate
  modified_base 11: mod_base = OTHER; note = 2'-O-methyladenosine-3'-phosphate
  modified_base 13: mod_base = OTHER; note = 2'-O-methylguanosine-3'-phosphate
  modified_base 14: mod_base = OTHER; note = 2'-fluoroadenosine-3'-phosphate
  modified_base 15: mod_base = OTHER; note = 2'-O-methyladenosine-3'-phosphate
  modified_base 16: mod_base = OTHER; note = 2'-O-methylguanosine-3'-phosphate
  modified_base 17: mod_base = OTHER; note = 2'-O-methyladenosine-3'-phosphate
  modified_base 18: mod_base = OTHER; note = 2'-O-methylguanosine-3'-phosphate
  modified_base 19: mod_base = OTHER; note = 2'-O-methylcytidine-3'-phosphate
  modified_base 20: mod_base = OTHER; note = 2'-O-methylcytidine-3'-phosphate
  modified_base 21: mod_base = OTHER; note = 2'-O-methyluridine-3'-phosphorothioate
  modified_base 22: mod_base = OTHER; note = 2'-O-methylcytidine-3'- phosphorothioate
  modified_base 23: mod_base = OTHER; note = 2'-O-methyladenosine-3'-phosphate
  misc_feature 1: note = RNA
  misc_feature 2: note = DNA
  misc_feature 3..4: note = RNA
  misc_feature 5: note = DNA
  misc_feature 6: note = RNA
  misc_feature 7: note = DNA
  misc_feature 8..11: note = RNA
  misc_feature 12: note = DNA
  misc_feature 13..23: note = RNA
ttgacaatgtaggaagagcctca

SEQ ID NO: 1168 - RNA, 23 nt, synthetic construct
  source 1..23: mol_type = other RNA
  modified_base 1: mod_base = OTHER; note = Vinyl-phosphonate 2'-O-methyluridine-3'-phosphorothioate
  modified_base 2: mod_base = OTHER; note = 2'-fluorocytidine-3'-phosphorothioate
  modified_base 3: mod_base = OTHER; note = 2'-O-methyluridine-3'-phosphate
  modified_base 4: mod_base = OTHER; note = 2'-O-methylguanosine-3'-phosphate
  modified_base 5: mod_base = OTHER; note = 2'-O-methyladenosine-3'-phosphate
  modified_base 6: mod_base = OTHER; note = 2'-fluorocytidine-3'-phosphate
  modified_base 7: mod_base = OTHER; note = 2'-O-methyladenosine-3'-phosphate
  modified_base 8: mod_base = OTHER; note = 2'-fluoroadenosine-3'-phosphate
  modified_base 9: mod_base = OTHER; note = 2'-fluorouridine-3'-phosphate
  modified_base 10: mod_base = OTHER; note = 2'-O-methylguanosine-3'-phosphate
  modified_base 11: mod_base = OTHER; note = 2'-O-methyluridine-3'-phosphate
  modified_base 12: mod_base = OTHER; note = 2'-O-methyladenosine-3'-phosphate
  modified_base 13: mod_base = OTHER; note = 2'-O-methylguanosine-3'-phosphate
  modified_base 14: mod_base = OTHER; note = 2'-fluoroguanosine-3'-phosphate
  modified_base 15: mod_base = OTHER; note = 2'-O-methyladenosine-3'-phosphate
  modified_base 16: mod_base = OTHER; note = 2'-fluoroadenosine-3'-phosphate
  modified_base 17: mod_base = OTHER; note = 2'-O-methylguanosine-3'-phosphate
  modified_base 18: mod_base = OTHER; note = 2'-O-methyladenosine-3'-phosphate
  modified_base 19: mod_base = OTHER; note = 2'-O-methylguanosine-3'-phosphate
  modified_base 20: mod_base = OTHER; note = 2'-O-methylcytidine-3'-phosphate
  modified_base 21: mod_base = OTHER; note = 2'-O-methylcytidine-3'- phosphorothioate
  modified_base 22: mod_base = OTHER; note = 2'-O-methyluridine-3'-phosphorothioate
  modified_base 23: mod_base = OTHER; note = 2'-O-methylcytidine-3'-phosphate
tctgacaatgtaggaagagcctc

SEQ ID NO: 1169 - DNA, 23 bp, synthetic construct
  source 1..23: mol_type = other DNA
  modified_base 1: mod_base = OTHER; note = Vinyl-phosphonate 2'-O-methyluridine-3'-phosphorothioate
  modified_base 2: mod_base = OTHER; note = 2'-deoxycytidine-3'-phosphorothioate
  modified_base 3: mod_base = OTHER; note = 2'-O-methyluridine-3'-phosphate
  modified_base 4: mod_base = OTHER; note = 2'-O-methylguanosine-3'-phosphate
  modified_base 6: mod_base = OTHER; note = 2'-O-methylcytidine-3'-phosphate
  modified_base 8: mod_base = OTHER; note = 2'-O-methyladenosine-3'-phosphate
  modified_base 9: mod_base = OTHER; note = 2'-O-methyluridine-3'-phosphate
  modified_base 10: mod_base = OTHER; note = 2'-O-methylguanosine-3'-phosphate
  modified_base 11: mod_base = OTHER; note = 2'-O-methyluridine-3'-phosphate
  modified_base 13: mod_base = OTHER; note = 2'-O-methylguanosine-3'-phosphate
  modified_base 14: mod_base = OTHER; note = 2'-fluoroguanosine-3'-phosphate
  modified_base 15: mod_base = OTHER; note = 2'-O-methyladenosine-3'-phosphate
  modified_base 16: mod_base = OTHER; note = 2'-O-methyladenosine-3'-phosphate
  modified_base 17: mod_base = OTHER; note = 2'-O-methylguanosine-3'-phosphate
  modified_base 18: mod_base = OTHER; note = 2'-O-methyladenosine-3'-phosphate
  modified_base 19: mod_base = OTHER; note = 2'-O-methylguanosine-3'-phosphate
  modified_base 20: mod_base = OTHER; note = 2'-O-methylcytidine-3'-phosphate
  modified_base 21: mod_base = OTHER; note = 2'-O-methylcytidine-3'- phosphorothioate
  modified_base 22: mod_base = OTHER; note = 2'-O-methyluridine-3'-phosphorothioate
  modified_base 23: mod_base = OTHER; note = 2'-O-methylcytidine-3'-phosphate
  misc_feature 1: note = RNA
  misc_feature 2: note = DNA
  misc_feature 3..4: note = RNA
  misc_feature 5: note = DNA
  misc_feature 6: note = RNA
  misc_feature 7: note = DNA
  misc_feature 8..11: note = RNA
  misc_feature 12: note = DNA
  misc_feature 13..23: note = RNA
tctgacaatgtaggaagagcctc

SEQ ID NO: 1170 - RNA, 23 nt, synthetic construct
  source 1..23: mol_type = other RNA
  modified_base 1: mod_base = OTHER; note = Vinyl-phosphonate 2'-O-methyluridine-3'-phosphorothioate
  modified_base 2: mod_base = OTHER; note = 2'-fluorocytidine-3'-phosphorothioate
  modified_base 3: mod_base = OTHER; note = 2'-O-methylcytidine-3'-phosphate
  modified_base 4: mod_base = OTHER; note = 2'-O-methyluridine-3'-phosphate
  modified_base 5: mod_base = OTHER; note = 2'-O-methylguanosine-3'-phosphate
  modified_base 6: mod_base = OTHER; note = 2'-fluoroadenosine-3'-phosphate
  modified_base 7: mod_base = OTHER; note = 2'-O-methylcytidine-3'-phosphate
  modified_base 8: mod_base = OTHER; note = 2'-fluoroadenosine-3'-phosphate
  modified_base 9: mod_base = OTHER; note = 2'-fluoroadenosine-3'-phosphate
  modified_base 10: mod_base = OTHER; note = 2'-O-methyluridine-3'-phosphate
  modified_base 11: mod_base = OTHER; note = 2'-O-methylguanosine-3'-phosphate
  modified_base 12: mod_base = OTHER; note = 2'-O-methyluridine-3'-phosphate
  modified_base 13: mod_base = OTHER; note = 2'-O-methyladenosine-3'-phosphate
  modified_base 14: mod_base = OTHER; note = 2'-fluoroguanosine-3'-phosphate
  modified_base 15: mod_base = OTHER; note = 2'-O-methylguanosine-3'-phosphate
  modified_base 16: mod_base = OTHER; note = 2'-fluoroadenosine-3'-phosphate
  modified_base 17: mod_base = OTHER; note = 2'-O-methyladenosine-3'-phosphate
  modified_base 18: mod_base = OTHER; note = 2'-O-methylguanosine-3'-phosphate
  modified_base 19: mod_base = OTHER; note = 2'-O-methyladenosine-3'-phosphate
  modified_base 20: mod_base = OTHER; note = 2'-O-methylguanosine-3'-phosphate
  modified_base 21: mod_base = OTHER; note = 2'-O-methylcytidine-3'- phosphorothioate
  modified_base 22: mod_base = OTHER; note = 2'-O-methylcytidine-3'- phosphorothioate
  modified_base 23: mod_base = OTHER; note = 2'-O-methyluridine-3'-phosphate
tcctgacaatgtaggaagagcct

SEQ ID NO: 1171 - DNA, 23 bp, synthetic construct
  source 1..23: mol_type = other DNA
  modified_base 1: mod_base = OTHER; note = Vinyl-phosphonate 2'-O-methyluridine-3'-phosphorothioate
  modified_base 2: mod_base = OTHER; note = 2'-deoxycytidine-3'-phosphorothioate
  modified_base 3: mod_base = OTHER; note = 2'-O-methylcytidine-3'-phosphate
  modified_base 4: mod_base = OTHER; note = 2'-O-methyluridine-3'-phosphate
  modified_base 6: mod_base = OTHER; note = 2'-O-methyladenosine-3'-phosphate
  modified_base 8: mod_base = OTHER; note = 2'-O-methyladenosine-3'-phosphate
  modified_base 9: mod_base = OTHER; note = 2'-O-methyladenosine-3'-phosphate
  modified_base 10: mod_base = OTHER; note = 2'-O-methyluridine-3'-phosphate
  modified_base 11: mod_base = OTHER; note = 2'-O-methylguanosine-3'-phosphate
  modified_base 13: mod_base = OTHER; note = 2'-O-methyladenosine-3'-phosphate
  modified_base 14: mod_base = OTHER; note = 2'-fluoroguanosine-3'-phosphate
  modified_base 15: mod_base = OTHER; note = 2'-O-methylguanosine-3'-phosphate
  modified_base 16: mod_base = OTHER; note = 2'-O-methyladenosine-3'-phosphate
  modified_base 17: mod_base = OTHER; note = 2'-O-methyladenosine-3'-phosphate
  modified_base 18: mod_base = OTHER; note = 2'-O-methylguanosine-3'-phosphate
  modified_base 19: mod_base = OTHER; note = 2'-O-methyladenosine-3'-phosphate
  modified_base 20: mod_base = OTHER; note = 2'-O-methylguanosine-3'-phosphate
  modified_base 21: mod_base = OTHER; note = 2'-O-methylcytidine-3'- phosphorothioate
  modified_base 22: mod_base = OTHER; note = 2'-O-methylcytidine-3'- phosphorothioate
  modified_base 23: mod_base = OTHER; note = 2'-O-methyluridine-3'-phosphate
  misc_feature 1: note = RNA
  misc_feature 2: note = DNA
  misc_feature 3..4: note = RNA
  misc_feature 5: note = DNA
  misc_feature 6: note = RNA
  misc_feature 7: note = DNA
  misc_feature 8..11: note = RNA
  misc_feature 12: note = DNA
  misc_feature 13..23: note = RNA
tcctgacaatgtaggaagagcct

SEQ ID NO: 1172 - DNA, 23 bp, synthetic construct
  source 1..23: mol_type = other DNA
  modified_base 1: mod_base = OTHER; note = Vinyl-phosphonate 2'-O-methyluridine-3'-phosphorothioate
  modified_base 2: mod_base = OTHER; note = 2'-fluorouridine -3'-phosphorothioate
  modified_base 3: mod_base = OTHER; note = 2'-O-methylcytidine-3'-phosphate
  modified_base 4: mod_base = OTHER; note = 2'-O-methylcytidine-3'-phosphate
  modified_base 6: mod_base = OTHER; note = 2'-O-methylguanosine-3'-phosphate
  modified_base 7: mod_base = OTHER; note = Adenosine-glycol nucleic acid (GNA) S-Isomer
  modified_base 8: mod_base = OTHER; note = 2'-O-methylcytidine-3'-phosphate
  modified_base 9: mod_base = OTHER; note = 2'-O-methyladenosine-3'-phosphate
  modified_base 10: mod_base = OTHER; note = 2'-O-methyladenosine-3'-phosphate
  modified_base 11: mod_base = OTHER; note = 2'-O-methyluridine-3'-phosphate
  modified_base 12: mod_base = OTHER; note = 2'-O-methylguanosine-3'-phosphate
  modified_base 13: mod_base = OTHER; note = 2'-O-methyluridine-3'-phosphate
  modified_base 14: mod_base = OTHER; note = 2'-fluoroadenosine-3'-phosphate
  modified_base 15: mod_base = OTHER; note = 2'-O-methylguanosine-3'-phosphate
  modified_base 16: mod_base = OTHER; note = 2'-fluoroguanosine-3'-phosphate
  modified_base 17: mod_base = OTHER; note = 2'-O-methyladenosine-3'-phosphate
  modified_base 18: mod_base = OTHER; note = 2'-O-methyladenosine-3'-phosphate
  modified_base 19: mod_base = OTHER; note = 2'-O-methylguanosine-3'-phosphate
  modified_base 20: mod_base = OTHER; note = 2'-O-methyladenosine-3'-phosphate
  modified_base 21: mod_base = OTHER; note = 2'-O-methylguanosine-3'- phosphorothioate
  modified_base 22: mod_base = OTHER; note = 2'-O-methylcytidine-3'- phosphorothioate
  modified_base 23: mod_base = OTHER; note = 2'-O-methylcytidine-3'-phosphate
  misc_feature 1..4: note = RNA
  misc_feature 5: note = DNA
  misc_feature 6..23: note = RNA
ttcctgacaatgtaggaagagcc

SEQ ID NO: 1173 - DNA, 23 bp, synthetic construct
  source 1..23: mol_type = other DNA
  modified_base 1: mod_base = OTHER; note = Vinyl-phosphonate 2'-O-methyluridine-3'-phosphorothioate
  modified_base 2: mod_base = OTHER; note = 2'-fluorouridine -3'-phosphorothioate
  modified_base 3: mod_base = OTHER; note = 2'-O-methylguanosine-3'-phosphate
  modified_base 4: mod_base = OTHER; note = 2'-O-methyluridine-3'-phosphate
  modified_base 6: mod_base = OTHER; note = 2'-O-methylcytidine-3'-phosphate
  modified_base 7: mod_base = OTHER; note = Thymidine-glycol nucleic acid (GNA) S-Isomer
  modified_base 8: mod_base = OTHER; note = 2'-O-methylguanosine-3'-phosphate
  modified_base 9: mod_base = OTHER; note = 2'-O-methyladenosine-3'-phosphate
  modified_base 10: mod_base = OTHER; note = 2'-O-methylcytidine-3'-phosphate
  modified_base 11: mod_base = OTHER; note = 2'-O-methyladenosine-3'-phosphate
  modified_base 12: mod_base = OTHER; note = 2'-O-methyladenosine-3'-phosphate
  modified_base 13: mod_base = OTHER; note = 2'-O-methyluridine-3'-phosphate
  modified_base 14: mod_base = OTHER; note = 2'-fluoroguanosine-3'-phosphate
  modified_base 15: mod_base = OTHER; note = 2'-O-methyluridine-3'-phosphate
  modified_base 16: mod_base = OTHER; note = 2'-fluoroadenosine-3'-phosphate
  modified_base 17: mod_base = OTHER; note = 2'-O-methylguanosine-3'-phosphate
  modified_base 18: mod_base = OTHER; note = 2'-O-methylguanosine-3'-phosphate
  modified_base 19: mod_base = OTHER; note = 2'-O-methyladenosine-3'-phosphate
  modified_base 20: mod_base = OTHER; note = 2'-O-methyladenosine-3'-phosphate
  modified_base 21: mod_base = OTHER; note = 2'-O-methylguanosine-3'- phosphorothioate
  modified_base 22: mod_base = OTHER; note = 2'-O-methyladenosine-3'- phosphorothioate
  modified_base 23: mod_base = OTHER; note = 2'-O-methylguanosine-3'-phosphate
  misc_feature 1..4: note = RNA
  misc_feature 5: note = DNA
  misc_feature 6: note = RNA
  misc_feature 7: note = DNA
  misc_feature 8..23: note = RNA
ttgtcctgacaatgtaggaagag

SEQ ID NO: 1174 - DNA, 23 bp, synthetic construct
  source 1..23: mol_type = other DNA
  modified_base 1: mod_base = OTHER; note = Vinyl-phosphonate 2'-O-methyluridine-3'-phosphorothioate
  modified_base 2: mod_base = OTHER; note = 2'-fluorouridine -3'-phosphorothioate
  modified_base 3: mod_base = OTHER; note = 2'-O-methylguanosine-3'-phosphate
  modified_base 4: mod_base = OTHER; note = 2'-O-methyladenosine-3'-phosphate
  modified_base 6: mod_base = OTHER; note = 2'-O-methyladenosine-3'-phosphate
  modified_base 7: mod_base = OTHER; note = Thymidine-glycol nucleic acid (GNA) S-Isomer
  modified_base 8: mod_base = OTHER; note = 2'-O-methylguanosine-3'-phosphate
  modified_base 9: mod_base = OTHER; note = 2'-O-methyluridine-3'-phosphate
  modified_base 10: mod_base = OTHER; note = 2'-O-methylcytidine-3'-phosphate
  modified_base 11: mod_base = OTHER; note = 2'-O-methylcytidine-3'-phosphate
  modified_base 12: mod_base = OTHER; note = 2'-O-methyluridine-3'-phosphate
  modified_base 13: mod_base = OTHER; note = 2'-O-methylguanosine-3'-phosphate
  modified_base 14: mod_base = OTHER; note = 2'-fluoroadenosine-3'-phosphate
  modified_base 15: mod_base = OTHER; note = 2'-O-methylcytidine-3'-phosphate
  modified_base 16: mod_base = OTHER; note = 2'-fluoroadenosine-3'-phosphate
  modified_base 17: mod_base = OTHER; note = 2'-O-methyladenosine-3'-phosphate
  modified_base 18: mod_base = OTHER; note = 2'-O-methyluridine-3'-phosphate
  modified_base 19: mod_base = OTHER; note = 2'-O-methylguanosine-3'-phosphate
  modified_base 20: mod_base = OTHER; note = 2'-O-methyluridine-3'-phosphate
  modified_base 21: mod_base = OTHER; note = 2'-O-methyladenosine-3'- phosphorothioate
  modified_base 22: mod_base = OTHER; note = 2'-O-methylguanosine-3'- phosphorothioate
  modified_base 23: mod_base = OTHER; note = 2'-O-methylguanosine-3'-phosphate
  misc_feature 1..4: note = RNA
  misc_feature 5: note = DNA
  misc_feature 6: note = RNA
  misc_feature 7: note = DNA
  misc_feature 8..23: note = RNA
ttgaaatgtcctgacaatgtagg

SEQ ID NO: 1175 - RNA, 23 nt, synthetic construct
  source 1..23: mol_type = other RNA
  modified_base 1: mod_base = OTHER; note = Vinyl-phosphonate 2'-O-methyluridine-3'-phosphorothioate
  modified_base 2: mod_base = OTHER; note = 2'-fluorouridine -3'-phosphorothioate
  modified_base 3: mod_base = OTHER; note = 2'-O-methylguanosine-3'-phosphate
  modified_base 4: mod_base = OTHER; note = 2'-O-methyladenosine-3'-phosphate
  modified_base 5: mod_base = OTHER; note = 2'-O-methyladenosine-3'-phosphate
  modified_base 6: mod_base = OTHER; note = 2'-fluoroadenosine-3'-phosphate
  modified_base 7: mod_base = OTHER; note = 2'-O-methyluridine-3'-phosphate
  modified_base 8: mod_base = OTHER; note = 2'-fluoroguanosine-3'-phosphate
  modified_base 9: mod_base = OTHER; note = 2'-fluorouridine-3'-phosphate
  modified_base 10: mod_base = OTHER; note = 2'-O-methylcytidine-3'-phosphate
  modified_base 11: mod_base = OTHER; note = 2'-O-methylcytidine-3'-phosphate
  modified_base 12: mod_base = OTHER; note = 2'-O-methyluridine-3'-phosphate
  modified_base 13: mod_base = OTHER; note = 2'-O-methylguanosine-3'-phosphate
  modified_base 14: mod_base = OTHER; note = 2'-fluoroadenosine-3'-phosphate
  modified_base 15: mod_base = OTHER; note = 2'-O-methylcytidine-3'-phosphate
  modified_base 16: mod_base = OTHER; note = 2'-fluoroadenosine-3'-phosphate
  modified_base 17: mod_base = OTHER; note = 2'-O-methyladenosine-3'-phosphate
  modified_base 18: mod_base = OTHER; note = 2'-O-methyluridine-3'-phosphate
  modified_base 19: mod_base = OTHER; note = 2'-O-methylguanosine-3'-phosphate
  modified_base 20: mod_base = OTHER; note = 2'-O-methyluridine-3'-phosphate
  modified_base 21: mod_base = OTHER; note = 2'-O-methyladenosine-3'- phosphorothioate
  modified_base 22: mod_base = OTHER; note = 2'-O-methylguanosine-3'- phosphorothioate
  modified_base 23: mod_base = OTHER; note = 2'-O-methylguanosine-3'-phosphate
ttgaaatgtcctgacaatgtagg

SEQ ID NO: 1176 - DNA, 23 bp, synthetic construct
  source 1..23: mol_type = other DNA
  modified_base 1: mod_base = OTHER; note = Vinyl-phosphonate 2'-O-methyluridine-3'-phosphorothioate
  modified_base 2: mod_base = OTHER; note = 2'-deoxythymidine-3'-phosphorothioate
  modified_base 3: mod_base = OTHER; note = 2'-O-methylguanosine-3'-phosphate
  modified_base 4: mod_base = OTHER; note = 2'-O-methyladenosine-3'-phosphate
  modified_base 6: mod_base = OTHER; note = 2'-O-methyladenosine-3'-phosphate
  modified_base 8: mod_base = OTHER; note = 2'-O-methylguanosine-3'-phosphate
  modified_base 9: mod_base = OTHER; note = 2'-O-methyluridine-3'-phosphate
  modified_base 10: mod_base = OTHER; note = 2'-O-methylcytidine-3'-phosphate
  modified_base 11: mod_base = OTHER; note = 2'-O-methylcytidine-3'-phosphate
  modified_base 13: mod_base = OTHER; note = 2'-O-methylguanosine-3'-phosphate
  modified_base 14: mod_base = OTHER; note = 2'-fluoroadenosine-3'-phosphate
  modified_base 15: mod_base = OTHER; note = 2'-O-methylcytidine-3'-phosphate
  modified_base 16: mod_base = OTHER; note = 2'-O-methyladenosine-3'-phosphate
  modified_base 17: mod_base = OTHER; note = 2'-O-methyladenosine-3'-phosphate
  modified_base 18: mod_base = OTHER; note = 2'-O-methyluridine-3'-phosphate
  modified_base 19: mod_base = OTHER; note = 2'-O-methylguanosine-3'-phosphate
  modified_base 20: mod_base = OTHER; note = 2'-O-methyluridine-3'-phosphate
  modified_base 21: mod_base = OTHER; note = 2'-O-methyladenosine-3'- phosphorothioate
  modified_base 22: mod_base = OTHER; note = 2'-O-methylguanosine-3'- phosphorothioate
  modified_base 23: mod_base = OTHER; note = 2'-O-methylguanosine-3'-phosphate
  misc_feature 1: note = RNA
  misc_feature 2: note = DNA
  misc_feature 3..4: note = RNA
  misc_feature 5: note = DNA
  misc_feature 6: note = RNA
  misc_feature 7: note = DNA
  misc_feature 8..11: note = RNA
  misc_feature 12: note = DNA
  misc_feature 13..23: note = RNA
ttgaaatgtcctgacaatgtagg

SEQ ID NO: 1177 - RNA, 23 nt, synthetic construct
  source 1..23: mol_type = other RNA
  modified_base 1: mod_base = OTHER; note = Vinyl-phosphonate 2'-O-methyluridine-3'-phosphorothioate
  modified_base 2: mod_base = OTHER; note = 2'-fluoroadenosine-3'-phosphorothioate
  modified_base 3: mod_base = OTHER; note = 2'-O-methyluridine-3'-phosphate
  modified_base 4: mod_base = OTHER; note = 2'-O-methylguanosine-3'-phosphate
  modified_base 5: mod_base = OTHER; note = 2'-O-methyladenosine-3'-phosphate
  modified_base 6: mod_base = OTHER; note = 2'-fluoroadenosine-3'-phosphate
  modified_base 7: mod_base = OTHER; note = 2'-O-methyladenosine-3'-phosphate
  modified_base 8: mod_base = OTHER; note = 2'-fluorouridine-3'-phosphate
  modified_base 9: mod_base = OTHER; note = 2'-fluoroguanosine-3'-phosphate
  modified_base 10: mod_base = OTHER; note = 2'-O-methyluridine-3'-phosphate
  modified_base 11: mod_base = OTHER; note = 2'-O-methylcytidine-3'-phosphate
  modified_base 12: mod_base = OTHER; note = 2'-O-methylcytidine-3'-phosphate
  modified_base 13: mod_base = OTHER; note = 2'-O-methyluridine-3'-phosphate
  modified_base 14: mod_base = OTHER; note = 2'-fluoroguanosine-3'-phosphate
  modified_base 15: mod_base = OTHER; note = 2'-O-methyladenosine-3'-phosphate
  modified_base 16: mod_base = OTHER; note = 2'-fluorocytidine-3'-phosphate
  modified_base 17: mod_base = OTHER; note = 2'-O-methyladenosine-3'-phosphate
  modified_base 18: mod_base = OTHER; note = 2'-O-methyladenosine-3'-phosphate
  modified_base 19: mod_base = OTHER; note = 2'-O-methyluridine-3'-phosphate
  modified_base 20: mod_base = OTHER; note = 2'-O-methylguanosine-3'-phosphate
  modified_base 21: mod_base = OTHER; note = 2'-O-methyluridine-3'-phosphorothioate
  modified_base 22: mod_base = OTHER; note = 2'-O-methyladenosine-3'- phosphorothioate
  modified_base 23: mod_base = OTHER; note = 2'-O-methylguanosine-3'-phosphate
tatgaaatgtcctgacaatgtag

SEQ ID NO: 1178 - DNA, 23 bp, synthetic construct
  source 1..23: mol_type = other DNA
  modified_base 1: mod_base = OTHER; note = Vinyl-phosphonate 2'-O-methyluridine-3'-phosphorothioate
  modified_base 2: mod_base = OTHER; note = 2'-deoxyadenosine-3'-phosphorothioate
  modified_base 3: mod_base = OTHER; note = 2'-O-methyluridine-3'-phosphate
  modified_base 4: mod_base = OTHER; note = 2'-O-methylguanosine-3'-phosphate
  modified_base 6: mod_base = OTHER; note = 2'-O-methyladenosine-3'-phosphate
  modified_base 8: mod_base = OTHER; note = 2'-O-methyluridine-3'-phosphate
  modified_base 9: mod_base = OTHER; note = 2'-O-methylguanosine-3'-phosphate
  modified_base 10: mod_base = OTHER; note = 2'-O-methyluridine-3'-phosphate
  modified_base 11: mod_base = OTHER; note = 2'-O-methylcytidine-3'-phosphate
  modified_base 13: mod_base = OTHER; note = 2'-O-methyluridine-3'-phosphate
  modified_base 14: mod_base = OTHER; note = 2'-fluoroguanosine-3'-phosphate
  modified_base 15: mod_base = OTHER; note = 2'-O-methyladenosine-3'-phosphate
  modified_base 16: mod_base = OTHER; note = 2'-O-methylcytidine-3'-phosphate
  modified_base 17: mod_base = OTHER; note = 2'-O-methyladenosine-3'-phosphate
  modified_base 18: mod_base = OTHER; note = 2'-O-methyladenosine-3'-phosphate
  modified_base 19: mod_base = OTHER; note = 2'-O-methyluridine-3'-phosphate
  modified_base 20: mod_base = OTHER; note = 2'-O-methylguanosine-3'-phosphate
  modified_base 21: mod_base = OTHER; note = 2'-O-methyluridine-3'-phosphorothioate
  modified_base 22: mod_base = OTHER; note = 2'-O-methyladenosine-3'- phosphorothioate
  modified_base 23: mod_base = OTHER; note = 2'-O-methylguanosine-3'-phosphate
  misc_feature 1: note = RNA
  misc_feature 2: note = DNA
  misc_feature 3..4: note = RNA
  misc_feature 5: note = DNA
  misc_feature 6: note = RNA
  misc_feature 7: note = DNA
  misc_feature 8..11: note = RNA
  misc_feature 12: note = DNA
  misc_feature 13..23: note = RNA
tatgaaatgtcctgacaatgtag

SEQ ID NO: 1179 - RNA, 23 nt, synthetic construct
  source 1..23: mol_type = other RNA
  modified_base 1: mod_base = OTHER; note = Vinyl-phosphonate 2'-O-methyluridine-3'-phosphorothioate
  modified_base 2: mod_base = OTHER; note = 2'-fluoroadenosine-3'-phosphorothioate
  modified_base 3: mod_base = OTHER; note = 2'-O-methyladenosine-3'-phosphate
  modified_base 4: mod_base = OTHER; note = 2'-O-methyluridine-3'-phosphate
  modified_base 5: mod_base = OTHER; note = 2'-O-methylguanosine-3'-phosphate
  modified_base 6: mod_base = OTHER; note = 2'-fluoroadenosine-3'-phosphate
  modified_base 7: mod_base = OTHER; note = 2'-O-methyladenosine-3'-phosphate
  modified_base 8: mod_base = OTHER; note = 2'-fluoroadenosine-3'-phosphate
  modified_base 9: mod_base = OTHER; note = 2'-fluorouridine-3'-phosphate
  modified_base 10: mod_base = OTHER; note = 2'-O-methylguanosine-3'-phosphate
  modified_base 11: mod_base = OTHER; note = 2'-O-methyluridine-3'-phosphate
  modified_base 12: mod_base = OTHER; note = 2'-O-methylcytidine-3'-phosphate
  modified_base 13: mod_base = OTHER; note = 2'-O-methylcytidine-3'-phosphate
  modified_base 14: mod_base = OTHER; note = 2'-fluorouridine-3'-phosphate
  modified_base 15: mod_base = OTHER; note = 2'-O-methylguanosine-3'-phosphate
  modified_base 16: mod_base = OTHER; note = 2'-fluoroadenosine-3'-phosphate
  modified_base 17: mod_base = OTHER; note = 2'-O-methylcytidine-3'-phosphate
  modified_base 18: mod_base = OTHER; note = 2'-O-methyladenosine-3'-phosphate
  modified_base 19: mod_base = OTHER; note = 2'-O-methyladenosine-3'-phosphate
  modified_base 20: mod_base = OTHER; note = 2'-O-methyluridine-3'-phosphate
  modified_base 21: mod_base = OTHER; note = 2'-O-methylguanosine-3'- phosphorothioate
  modified_base 22: mod_base = OTHER; note = 2'-O-methyluridine-3'-phosphorothioate
  modified_base 23: mod_base = OTHER; note = 2'-O-methyladenosine-3'-phosphate
taatgaaatgtcctgacaatgta

SEQ ID NO: 1180 - DNA, 23 bp, synthetic construct
  source 1..23: mol_type = other DNA
  modified_base 1: mod_base = OTHER; note = Vinyl-phosphonate 2'-O-methyluridine-3'-phosphorothioate
  modified_base 2: mod_base = OTHER; note = 2'-deoxyadenosine-3'-phosphorothioate
  modified_base 3: mod_base = OTHER; note = 2'-O-methyladenosine-3'-phosphate
  modified_base 4: mod_base = OTHER; note = 2'-O-methyluridine-3'-phosphate
  modified_base 6: mod_base = OTHER; note = 2'-O-methyladenosine-3'-phosphate
  modified_base 8: mod_base = OTHER; note = 2'-O-methyladenosine-3'-phosphate
  modified_base 9: mod_base = OTHER; note = 2'-O-methyluridine-3'-phosphate
  modified_base 10: mod_base = OTHER; note = 2'-O-methylguanosine-3'-phosphate
  modified_base 11: mod_base = OTHER; note = 2'-O-methyluridine-3'-phosphate
  modified_base 13: mod_base = OTHER; note = 2'-O-methylcytidine-3'-phosphate
  modified_base 14: mod_base = OTHER; note = 2'-fluorouridine-3'-phosphate
  modified_base 15: mod_base = OTHER; note = 2'-O-methylguanosine-3'-phosphate
  modified_base 16: mod_base = OTHER; note = 2'-O-methyladenosine-3'-phosphate
  modified_base 17: mod_base = OTHER; note = 2'-O-methylcytidine-3'-phosphate
  modified_base 18: mod_base = OTHER; note = 2'-O-methyladenosine-3'-phosphate
  modified_base 19: mod_base = OTHER; note = 2'-O-methyladenosine-3'-phosphate
  modified_base 20: mod_base = OTHER; note = 2'-O-methyluridine-3'-phosphate
  modified_base 21: mod_base = OTHER; note = 2'-O-methylguanosine-3'- phosphorothioate
  modified_base 22: mod_base = OTHER; note = 2'-O-methyluridine-3'-phosphorothioate
  modified_base 23: mod_base = OTHER; note = 2'-O-methyladenosine-3'-phosphate
  misc_feature 1: note = RNA
  misc_feature 2: note = DNA
  misc_feature 3..4: note = RNA
  misc_feature 5: note = DNA
  misc_feature 6: note = RNA
  misc_feature 7: note = DNA
  misc_feature 8..11: note = RNA
  misc_feature 12: note = DNA
  misc_feature 13..23: note = RNA
taatgaaatgtcctgacaatgta

SEQ ID NO: 1181 - RNA, 23 nt, synthetic construct
  source 1..23: mol_type = other RNA
  modified_base 1: mod_base = OTHER; note = Vinyl-phosphonate 2'-O-methyluridine-3'-phosphorothioate
  modified_base 2: mod_base = OTHER; note = 2'-fluorouridine -3'-phosphorothioate
  modified_base 3: mod_base = OTHER; note = 2'-O-methyladenosine-3'-phosphate
  modified_base 4: mod_base = OTHER; note = 2'-O-methyladenosine-3'-phosphate
  modified_base 5: mod_base = OTHER; note = 2'-O-methyladenosine-3'-phosphate
  modified_base 6: mod_base = OTHER; note = 2'-fluorouridine-3'-phosphate
  modified_base 7: mod_base = OTHER; note = 2'-O-methylguanosine-3'-phosphate
  modified_base 8: mod_base = OTHER; note = 2'-fluoroadenosine-3'-phosphate
  modified_base 9: mod_base = OTHER; note = 2'-fluoroadenosine-3'-phosphate
  modified_base 10: mod_base = OTHER; note = 2'-O-methyladenosine-3'-phosphate
  modified_base 11: mod_base = OTHER; note = 2'-O-methyluridine-3'-phosphate
  modified_base 12: mod_base = OTHER; note = 2'-O-methylguanosine-3'-phosphate
  modified_base 13: mod_base = OTHER; note = 2'-O-methyluridine-3'-phosphate
  modified_base 14: mod_base = OTHER; note = 2'-fluorocytidine-3'-phosphate
  modified_base 15: mod_base = OTHER; note = 2'-O-methylcytidine-3'-phosphate
  modified_base 16: mod_base = OTHER; note = 2'-fluorouridine-3'-phosphate
  modified_base 17: mod_base = OTHER; note = 2'-O-methylguanosine-3'-phosphate
  modified_base 18: mod_base = OTHER; note = 2'-O-methyladenosine-3'-phosphate
  modified_base 19: mod_base = OTHER; note = 2'-O-methylcytidine-3'-phosphate
  modified_base 20: mod_base = OTHER; note = 2'-O-methyladenosine-3'-phosphate
  modified_base 21: mod_base = OTHER; note = 2'-O-methyladenosine-3'- phosphorothioate
  modified_base 22: mod_base = OTHER; note = 2'-O-methyluridine-3'-phosphorothioate
  modified_base 23: mod_base = OTHER; note = 2'-O-methylguanosine-3'-phosphate
ttaaatgaaatgtcctgacaatg

SEQ ID NO: 1182 - DNA, 23 bp, synthetic construct
  source 1..23: mol_type = other DNA
  modified_base 1: mod_base = OTHER; note = Vinyl-phosphonate 2'-O-methyluridine-3'-phosphorothioate
  modified_base 2: mod_base = OTHER; note = 2'-deoxythymidine-3'-phosphorothioate
  modified_base 3: mod_base = OTHER; note = 2'-O-methyladenosine-3'-phosphate
  modified_base 4: mod_base = OTHER; note = 2'-O-methyladenosine-3'-phosphate
  modified_base 6: mod_base = OTHER; note = 2'-O-methyluridine-3'-phosphate
  modified_base 8: mod_base = OTHER; note = 2'-O-methyladenosine-3'-phosphate
  modified_base 9: mod_base = OTHER; note = 2'-O-methyladenosine-3'-phosphate
  modified_base 10: mod_base = OTHER; note = 2'-O-methyladenosine-3'-phosphate
  modified_base 11: mod_base = OTHER; note = 2'-O-methyluridine-3'-phosphate
  modified_base 13: mod_base = OTHER; note = 2'-O-methyluridine-3'-phosphate
  modified_base 14: mod_base = OTHER; note = 2'-fluorocytidine-3'-phosphate
  modified_base 15: mod_base = OTHER; note = 2'-O-methylcytidine-3'-phosphate
  modified_base 16: mod_base = OTHER; note = 2'-O-methyluridine-3'-phosphate
  modified_base 17: mod_base = OTHER; note = 2'-O-methylguanosine-3'-phosphate
  modified_base 18: mod_base = OTHER; note = 2'-O-methyladenosine-3'-phosphate
  modified_base 19: mod_base = OTHER; note = 2'-O-methylcytidine-3'-phosphate
  modified_base 20: mod_base = OTHER; note = 2'-O-methyladenosine-3'-phosphate
  modified_base 21: mod_base = OTHER; note = 2'-O-methyladenosine-3'- phosphorothioate
  modified_base 22: mod_base = OTHER; note = 2'-O-methyluridine-3'-phosphorothioate
  modified_base 23: mod_base = OTHER; note = 2'-O-methylguanosine-3'-phosphate
  misc_feature 1: note = RNA
  misc_feature 2: note = DNA
  misc_feature 3..4: note = RNA
  misc_feature 5: note = DNA
  misc_feature 6: note = RNA
  misc_feature 7: note = DNA
  misc_feature 8..11: note = RNA
  misc_feature 12: note = DNA
  misc_feature 13..23: note = RNA
ttaaatgaaatgtcctgacaatg

SEQ ID NO: 1183 - RNA, 23 nt, synthetic construct
  source 1..23: mol_type = other RNA
  modified_base 1: mod_base = OTHER; note = Vinyl-phosphonate 2'-O-methyluridine-3'-phosphorothioate
  modified_base 2: mod_base = OTHER; note = 2'-fluoroadenosine-3'-phosphorothioate
  modified_base 3: mod_base = OTHER; note = 2'-O-methyladenosine-3'-phosphate
  modified_base 4: mod_base = OTHER; note = 2'-O-methylcytidine-3'-phosphate
  modified_base 5: mod_base = OTHER; note = 2'-O-methyluridine-3'-phosphate
  modified_base 6: mod_base = OTHER; note = 2'-fluoroadenosine-3'-phosphate
  modified_base 7: mod_base = OTHER; note = 2'-O-methyladenosine-3'-phosphate
  modified_base 8: mod_base = OTHER; note = 2'-fluoroadenosine-3'-phosphate
  modified_base 9: mod_base = OTHER; note = 2'-fluorouridine-3'-phosphate
  modified_base 10: mod_base = OTHER; note = 2'-O-methylguanosine-3'-phosphate
  modified_base 11: mod_base = OTHER; note = 2'-O-methyladenosine-3'-phosphate
  modified_base 12: mod_base = OTHER; note = 2'-O-methyladenosine-3'-phosphate
  modified_base 13: mod_base = OTHER; note = 2'-O-methyladenosine-3'-phosphate
  modified_base 14: mod_base = OTHER; note = 2'-fluorouridine-3'-phosphate
  modified_base 15: mod_base = OTHER; note = 2'-O-methylguanosine-3'-phosphate
  modified_base 16: mod_base = OTHER; note = 2'-fluorouridine-3'-phosphate
  modified_base 17: mod_base = OTHER; note = 2'-O-methylcytidine-3'-phosphate
  modified_base 18: mod_base = OTHER; note = 2'-O-methylcytidine-3'-phosphate
  modified_base 19: mod_base = OTHER; note = 2'-O-methyluridine-3'-phosphate
  modified_base 20: mod_base = OTHER; note = 2'-O-methylguanosine-3'-phosphate
  modified_base 21: mod_base = OTHER; note = 2'-O-methyladenosine-3'- phosphorothioate
  modified_base 22: mod_base = OTHER; note = 2'-O-methylcytidine-3'- phosphorothioate
  modified_base 23: mod_base = OTHER; note = 2'-O-methyladenosine-3'-phosphate
taactaaatgaaatgtcctgaca

SEQ ID NO: 1184 - DNA, 23 bp, synthetic construct
  source 1..23: mol_type = other DNA
  modified_base 1: mod_base = OTHER; note = Vinyl-phosphonate 2'-O-methyluridine-3'-phosphorothioate
  modified_base 2: mod_base = OTHER; note = 2'-deoxyadenosine-3'-phosphorothioate
  modified_base 3: mod_base = OTHER; note = 2'-O-methyladenosine-3'-phosphate
  modified_base 4: mod_base = OTHER; note = 2'-O-methylcytidine-3'-phosphate
  modified_base 6: mod_base = OTHER; note = 2'-O-methyladenosine-3'-phosphate
  modified_base 8: mod_base = OTHER; note = 2'-O-methyladenosine-3'-phosphate
  modified_base 9: mod_base = OTHER; note = 2'-O-methyluridine-3'-phosphate
  modified_base 10: mod_base = OTHER; note = 2'-O-methylguanosine-3'-phosphate
  modified_base 11: mod_base = OTHER; note = 2'-O-methyladenosine-3'-phosphate
  modified_base 13: mod_base = OTHER; note = 2'-O-methyladenosine-3'-phosphate
  modified_base 14: mod_base = OTHER; note = 2'-fluorouridine-3'-phosphate
  modified_base 15: mod_base = OTHER; note = 2'-O-methylguanosine-3'-phosphate
  modified_base 16: mod_base = OTHER; note = 2'-O-methyluridine-3'-phosphate
  modified_base 17: mod_base = OTHER; note = 2'-O-methylcytidine-3'-phosphate
  modified_base 18: mod_base = OTHER; note = 2'-O-methylcytidine-3'-phosphate
  modified_base 19: mod_base = OTHER; note = 2'-O-methyluridine-3'-phosphate
  modified_base 20: mod_base = OTHER; note = 2'-O-methylguanosine-3'-phosphate
  modified_base 21: mod_base = OTHER; note = 2'-O-methyladenosine-3'- phosphorothioate
  modified_base 22: mod_base = OTHER; note = 2'-O-methylcytidine-3'- phosphorothioate
  modified_base 23: mod_base = OTHER; note = 2'-O-methyladenosine-3'-phosphate
  misc_feature 1: note = RNA
  misc_feature 2: note = DNA
  misc_feature 3..4: note = RNA
  misc_feature 5: note = DNA
  misc_feature 6: note = RNA
  misc_feature 7: note = DNA
  misc_feature 8..11: note = RNA
  misc_feature 12: note = DNA
  misc_feature 13..23: note = RNA
taactaaatgaaatgtcctgaca

SEQ ID NO: 1185 - RNA, 23 nt, synthetic construct
  source 1..23: mol_type = other RNA
  modified_base 1: mod_base = OTHER; note = Vinyl-phosphonate 2'-O-methyluridine-3'-phosphorothioate
  modified_base 2: mod_base = OTHER; note = 2'-fluoroguanosine-3'-phosphorothioate
  modified_base 3: mod_base = OTHER; note = 2'-O-methyladenosine-3'-phosphate
  modified_base 4: mod_base = OTHER; note = 2'-O-methyladenosine-3'-phosphate
  modified_base 5: mod_base = OTHER; note = 2'-O-methylcytidine-3'-phosphate
  modified_base 6: mod_base = OTHER; note = 2'-fluorouridine-3'-phosphate
  modified_base 7: mod_base = OTHER; note = 2'-O-methyladenosine-3'-phosphate
  modified_base 8: mod_base = OTHER; note = 2'-fluoroadenosine-3'-phosphate
  modified_base 9: mod_base = OTHER; note = 2'-fluoroadenosine-3'-phosphate
  modified_base 10: mod_base = OTHER; note = 2'-O-methyluridine-3'-phosphate
  modified_base 11: mod_base = OTHER; note = 2'-O-methylguanosine-3'-phosphate
  modified_base 12: mod_base = OTHER; note = 2'-O-methyladenosine-3'-phosphate
  modified_base 13: mod_base = OTHER; note = 2'-O-methyladenosine-3'-phosphate
  modified_base 14: mod_base = OTHER; note = 2'-fluoroadenosine-3'-phosphate
  modified_base 15: mod_base = OTHER; note = 2'-O-methyluridine-3'-phosphate
  modified_base 16: mod_base = OTHER; note = 2'-fluoroguanosine-3'-phosphate
  modified_base 17: mod_base = OTHER; note = 2'-O-methyluridine-3'-phosphate
  modified_base 18: mod_base = OTHER; note = 2'-O-methylcytidine-3'-phosphate
  modified_base 19: mod_base = OTHER; note = 2'-O-methylcytidine-3'-phosphate
  modified_base 20: mod_base = OTHER; note = 2'-O-methyluridine-3'-phosphate
  modified_base 21: mod_base = OTHER; note = 2'-O-methylguanosine-3'- phosphorothioate
  modified_base 22: mod_base = OTHER; note = 2'-O-methyladenosine-3'- phosphorothioate
  modified_base 23: mod_base = OTHER; note = 2'-O-methylcytidine-3'-phosphate
tgaactaaatgaaatgtcctgac

SEQ ID NO: 1186 - DNA, 23 bp, synthetic construct
  source 1..23: mol_type = other DNA
  modified_base 1: mod_base = OTHER; note = Vinyl-phosphonate 2'-O-methyluridine-3'-phosphorothioate
  modified_base 2: mod_base = OTHER; note = 2'-deoxyguanosine-3'-phosphorothioate
  modified_base 3: mod_base = OTHER; note = 2'-O-methyladenosine-3'-phosphate
  modified_base 4: mod_base = OTHER; note = 2'-O-methyladenosine-3'-phosphate
  modified_base 6: mod_base = OTHER; note = 2'-O-methyluridine-3'-phosphate
  modified_base 8: mod_base = OTHER; note = 2'-O-methyladenosine-3'-phosphate
  modified_base 9: mod_base = OTHER; note = 2'-O-methyladenosine-3'-phosphate
  modified_base 10: mod_base = OTHER; note = 2'-O-methyluridine-3'-phosphate
  modified_base 11: mod_base = OTHER; note = 2'-O-methylguanosine-3'-phosphate
  modified_base 13: mod_base = OTHER; note = 2'-O-methyladenosine-3'-phosphate
  modified_base 14: mod_base = OTHER; note = 2'-fluoroadenosine-3'-phosphate
  modified_base 15: mod_base = OTHER; note = 2'-O-methyluridine-3'-phosphate
  modified_base 16: mod_base = OTHER; note = 2'-O-methylguanosine-3'-phosphate
  modified_base 17: mod_base = OTHER; note = 2'-O-methyluridine-3'-phosphate
  modified_base 18: mod_base = OTHER; note = 2'-O-methylcytidine-3'-phosphate
  modified_base 19: mod_base = OTHER; note = 2'-O-methylcytidine-3'-phosphate
  modified_base 20: mod_base = OTHER; note = 2'-O-methyluridine-3'-phosphate
  modified_base 21: mod_base = OTHER; note = 2'-O-methylguanosine-3'- phosphorothioate
  modified_base 22: mod_base = OTHER; note = 2'-O-methyladenosine-3'- phosphorothioate
  modified_base 23: mod_base = OTHER; note = 2'-O-methylcytidine-3'-phosphate
  misc_feature 1: note = RNA
  misc_feature 2: note = DNA
  misc_feature 3..4: note = RNA
  misc_feature 5: note = DNA
  misc_feature 6: note = RNA
  misc_feature 7: note = DNA
  misc_feature 8..11: note = RNA
  misc_feature 12: note = DNA
  misc_feature 13..23: note = RNA
tgaactaaatgaaatgtcctgac

SEQ ID NO: 1187 - DNA, 23 bp, synthetic construct
  source 1..23: mol_type = other DNA
  modified_base 1: mod_base = OTHER; note = Vinyl-phosphonate 2'-O-methyluridine-3'-phosphorothioate
  modified_base 2: mod_base = OTHER; note = 2'-fluorouridine -3'-phosphorothioate
  modified_base 3: mod_base = OTHER; note = 2'-O-methylguanosine-3'-phosphate
  modified_base 4: mod_base = OTHER; note = 2'-O-methyladenosine-3'-phosphate
  modified_base 6: mod_base = OTHER; note = 2'-O-methylcytidine-3'-phosphate
  modified_base 7: mod_base = OTHER; note = Thymidine-glycol nucleic acid (GNA) S-Isomer
  modified_base 8: mod_base = OTHER; note = 2'-O-methyladenosine-3'-phosphate
  modified_base 9: mod_base = OTHER; note = 2'-O-methyladenosine-3'-phosphate
  modified_base 10: mod_base = OTHER; note = 2'-O-methyladenosine-3'-phosphate
  modified_base 11: mod_base = OTHER; note = 2'-O-methyluridine-3'-phosphate
  modified_base 12: mod_base = OTHER; note = 2'-O-methylguanosine-3'-phosphate
  modified_base 13: mod_base = OTHER; note = 2'-O-methyladenosine-3'-phosphate
  modified_base 14: mod_base = OTHER; note = 2'-fluoroadenosine-3'-phosphate
  modified_base 15: mod_base = OTHER; note = 2'-O-methyladenosine-3'-phosphate
  modified_base 16: mod_base = OTHER; note = 2'-fluorouridine-3'-phosphate
  modified_base 17: mod_base = OTHER; note = 2'-O-methylguanosine-3'-phosphate
  modified_base 18: mod_base = OTHER; note = 2'-O-methyluridine-3'-phosphate
  modified_base 19: mod_base = OTHER; note = 2'-O-methylcytidine-3'-phosphate
  modified_base 20: mod_base = OTHER; note = 2'-O-methylcytidine-3'-phosphate
  modified_base 21: mod_base = OTHER; note = 2'-O-methyluridine-3'-phosphorothioate
  modified_base 22: mod_base = OTHER; note = 2'-O-methylguanosine-3'- phosphorothioate
  modified_base 23: mod_base = OTHER; note = 2'-O-methyladenosine-3'-phosphate
  misc_feature 1..4: note = RNA
  misc_feature 5: note = DNA
  misc_feature 6: note = RNA
  misc_feature 7: note = DNA
  misc_feature 8..23: note = RNA
ttgaactaaatgaaatgtcctga

SEQ ID NO: 1188 - RNA, 23 nt, synthetic construct
  source 1..23: mol_type = other RNA
  modified_base 1: mod_base = OTHER; note = Vinyl-phosphonate 2'-O-methyluridine-3'-phosphorothioate
  modified_base 2: mod_base = OTHER; note = 2'-fluoroadenosine-3'-phosphorothioate
  modified_base 3: mod_base = OTHER; note = 2'-O-methyluridine-3'-phosphate
  modified_base 4: mod_base = OTHER; note = 2'-O-methylguanosine-3'-phosphate
  modified_base 5: mod_base = OTHER; note = 2'-O-methyladenosine-3'-phosphate
  modified_base 6: mod_base = OTHER; note = 2'-fluoroadenosine-3'-phosphate
  modified_base 7: mod_base = OTHER; note = 2'-O-methylcytidine-3'-phosphate
  modified_base 8: mod_base = OTHER; note = 2'-fluorouridine-3'-phosphate
  modified_base 9: mod_base = OTHER; note = 2'-fluoroadenosine-3'-phosphate
  modified_base 10: mod_base = OTHER; note = 2'-O-methyladenosine-3'-phosphate
  modified_base 11: mod_base = OTHER; note = 2'-O-methyladenosine-3'-phosphate
  modified_base 12: mod_base = OTHER; note = 2'-O-methyluridine-3'-phosphate
  modified_base 13: mod_base = OTHER; note = 2'-O-methylguanosine-3'-phosphate
  modified_base 14: mod_base = OTHER; note = 2'-fluoroadenosine-3'-phosphate
  modified_base 15: mod_base = OTHER; note = 2'-O-methyladenosine-3'-phosphate
  modified_base 16: mod_base = OTHER; note = 2'-fluoroadenosine-3'-phosphate
  modified_base 17: mod_base = OTHER; note = 2'-O-methyluridine-3'-phosphate
  modified_base 18: mod_base = OTHER; note = 2'-O-methylguanosine-3'-phosphate
  modified_base 19: mod_base = OTHER; note = 2'-O-methyluridine-3'-phosphate
  modified_base 20: mod_base = OTHER; note = 2'-O-methylcytidine-3'-phosphate
  modified_base 21: mod_base = OTHER; note = 2'-O-methylcytidine-3'- phosphorothioate
  modified_base 22: mod_base = OTHER; note = 2'-O-methyluridine-3'-phosphorothioate
  modified_base 23: mod_base = OTHER; note = 2'-O-methylguanosine-3'-phosphate
tatgaactaaatgaaatgtcctg

SEQ ID NO: 1189 - DNA, 23 bp, synthetic construct
  source 1..23: mol_type = other DNA
  modified_base 1: mod_base = OTHER; note = Vinyl-phosphonate 2'-O-methyluridine-3'-phosphorothioate
  modified_base 2: mod_base = OTHER; note = 2'-deoxyadenosine-3'-phosphorothioate
  modified_base 3: mod_base = OTHER; note = 2'-O-methyluridine-3'-phosphate
  modified_base 4: mod_base = OTHER; note = 2'-O-methylguanosine-3'-phosphate
  modified_base 6: mod_base = OTHER; note = 2'-O-methyladenosine-3'-phosphate
  modified_base 8: mod_base = OTHER; note = 2'-O-methyluridine-3'-phosphate
  modified_base 9: mod_base = OTHER; note = 2'-O-methyladenosine-3'-phosphate
  modified_base 10: mod_base = OTHER; note = 2'-O-methyladenosine-3'-phosphate
  modified_base 11: mod_base = OTHER; note = 2'-O-methyladenosine-3'-phosphate
  modified_base 13: mod_base = OTHER; note = 2'-O-methylguanosine-3'-phosphate
  modified_base 14: mod_base = OTHER; note = 2'-fluoroadenosine-3'-phosphate
  modified_base 15: mod_base = OTHER; note = 2'-O-methyladenosine-3'-phosphate
  modified_base 16: mod_base = OTHER; note = 2'-O-methyladenosine-3'-phosphate
  modified_base 17: mod_base = OTHER; note = 2'-O-methyluridine-3'-phosphate
  modified_base 18: mod_base = OTHER; note = 2'-O-methylguanosine-3'-phosphate
  modified_base 19: mod_base = OTHER; note = 2'-O-methyluridine-3'-phosphate
  modified_base 20: mod_base = OTHER; note = 2'-O-methylcytidine-3'-phosphate
  modified_base 21: mod_base = OTHER; note = 2'-O-methylcytidine-3'- phosphorothioate
  modified_base 22: mod_base = OTHER; note = 2'-O-methyluridine-3'-phosphorothioate
  modified_base 23: mod_base = OTHER; note = 2'-O-methylguanosine-3'-phosphate
  misc_feature 1: note = RNA
  misc_feature 2: note = DNA
  misc_feature 3..4: note = RNA
  misc_feature 5: note = DNA
  misc_feature 6: note = RNA
  misc_feature 7: note = DNA
  misc_feature 8..11: note = RNA
  misc_feature 12: note = DNA
  misc_feature 13..23: note = RNA
tatgaactaaatgaaatgtcctg

SEQ ID NO: 1190 - DNA, 23 bp, synthetic construct
  source 1..23: mol_type = other DNA
  modified_base 1: mod_base = OTHER; note = Vinyl-phosphonate 2'-O-methyluridine-3'-phosphorothioate
  modified_base 2: mod_base = OTHER; note = 2'-fluorouridine -3'-phosphorothioate
  modified_base 3: mod_base = OTHER; note = 2'-O-methylcytidine-3'-phosphate
  modified_base 4: mod_base = OTHER; note = 2'-O-methyladenosine-3'-phosphate
  modified_base 6: mod_base = OTHER; note = 2'-O-methylguanosine-3'-phosphate
  modified_base 7: mod_base = OTHER; note = Adenosine-glycol nucleic acid (GNA) S-Isomer
  modified_base 8: mod_base = OTHER; note = 2'-O-methyladenosine-3'-phosphate
  modified_base 9: mod_base = OTHER; note = 2'-O-methylcytidine-3'-phosphate
  modified_base 10: mod_base = OTHER; note = 2'-O-methyluridine-3'-phosphate
  modified_base 11: mod_base = OTHER; note = 2'-O-methyladenosine-3'-phosphate
  modified_base 12: mod_base = OTHER; note = 2'-O-methyladenosine-3'-phosphate
  modified_base 13: mod_base = OTHER; note = 2'-O-methyladenosine-3'-phosphate
  modified_base 14: mod_base = OTHER; note = 2'-fluorouridine-3'-phosphate
  modified_base 15: mod_base = OTHER; note = 2'-O-methylguanosine-3'-phosphate
  modified_base 16: mod_base = OTHER; note = 2'-fluoroadenosine-3'-phosphate
  modified_base 17: mod_base = OTHER; note = 2'-O-methyladenosine-3'-phosphate
  modified_base 18: mod_base = OTHER; note = 2'-O-methyladenosine-3'-phosphate
  modified_base 19: mod_base = OTHER; note = 2'-O-methyluridine-3'-phosphate
  modified_base 20: mod_base = OTHER; note = 2'-O-methylguanosine-3'-phosphate
  modified_base 21: mod_base = OTHER; note = 2'-O-methyluridine-3'-phosphorothioate
  modified_base 22: mod_base = OTHER; note = 2'-O-methylcytidine-3'- phosphorothioate
  modified_base 23: mod_base = OTHER; note = 2'-O-methylcytidine-3'-phosphate
  misc_feature 1..4: note = RNA
  misc_feature 5: note = DNA
  misc_feature 6..23: note = RNA
ttcatgaactaaatgaaatgtcc

SEQ ID NO: 1191 - RNA, 23 nt, synthetic construct
  source 1..23: mol_type = other RNA
  modified_base 1: mod_base = OTHER; note = Vinyl-phosphonate 2'-O-methyluridine-3'-phosphorothioate
  modified_base 2: mod_base = OTHER; note = 2'-fluorouridine -3'-phosphorothioate
  modified_base 3: mod_base = OTHER; note = 2'-O-methylcytidine-3'-phosphate
  modified_base 4: mod_base = OTHER; note = 2'-O-methyladenosine-3'-phosphate
  modified_base 5: mod_base = OTHER; note = 2'-O-methyluridine-3'-phosphate
  modified_base 6: mod_base = OTHER; note = 2'-fluoroguanosine-3'-phosphate
  modified_base 7: mod_base = OTHER; note = 2'-O-methyladenosine-3'-phosphate
  modified_base 8: mod_base = OTHER; note = 2'-fluoroadenosine-3'-phosphate
  modified_base 9: mod_base = OTHER; note = 2'-fluorocytidine-3'-phosphate
  modified_base 10: mod_base = OTHER; note = 2'-O-methyluridine-3'-phosphate
  modified_base 11: mod_base = OTHER; note = 2'-O-methyladenosine-3'-phosphate
  modified_base 12: mod_base = OTHER; note = 2'-O-methyladenosine-3'-phosphate
  modified_base 13: mod_base = OTHER; note = 2'-O-methyladenosine-3'-phosphate
  modified_base 14: mod_base = OTHER; note = 2'-fluorouridine-3'-phosphate
  modified_base 15: mod_base = OTHER; note = 2'-O-methylguanosine-3'-phosphate
  modified_base 16: mod_base = OTHER; note = 2'-fluoroadenosine-3'-phosphate
  modified_base 17: mod_base = OTHER; note = 2'-O-methyladenosine-3'-phosphate
  modified_base 18: mod_base = OTHER; note = 2'-O-methyladenosine-3'-phosphate
  modified_base 19: mod_base = OTHER; note = 2'-O-methyluridine-3'-phosphate
  modified_base 20: mod_base = OTHER; note = 2'-O-methylguanosine-3'-phosphate
  modified_base 21: mod_base = OTHER; note = 2'-O-methyluridine-3'-phosphorothioate
  modified_base 22: mod_base = OTHER; note = 2'-O-methylcytidine-3'- phosphorothioate
  modified_base 23: mod_base = OTHER; note = 2'-O-methylcytidine-3'-phosphate
ttcatgaactaaatgaaatgtcc

SEQ ID NO: 1192 - DNA, 23 bp, synthetic construct
  source 1..23: mol_type = other DNA
  modified_base 1: mod_base = OTHER; note = Vinyl-phosphonate 2'-O-methyluridine-3'-phosphorothioate
  modified_base 2: mod_base = OTHER; note = 2'-fluorouridine -3'-phosphorothioate
  modified_base 3: mod_base = OTHER; note = 2'-O-methylguanosine-3'-phosphate
  modified_base 4: mod_base = OTHER; note = 2'-O-methyladenosine-3'-phosphate
  modified_base 6: mod_base = OTHER; note = 2'-O-methylcytidine-3'-phosphate
  modified_base 7: mod_base = OTHER; note = Adenosine-glycol nucleic acid (GNA) S-Isomer
  modified_base 8: mod_base = OTHER; note = 2'-O-methyluridine-3'-phosphate
  modified_base 9: mod_base = OTHER; note = 2'-O-methylguanosine-3'-phosphate
  modified_base 10: mod_base = OTHER; note = 2'-O-methyladenosine-3'-phosphate
  modified_base 11: mod_base = OTHER; note = 2'-O-methyladenosine-3'-phosphate
  modified_base 12: mod_base = OTHER; note = 2'-O-methylcytidine-3'-phosphate
  modified_base 13: mod_base = OTHER; note = 2'-O-methyluridine-3'-phosphate
  modified_base 14: mod_base = OTHER; note = 2'-fluoroadenosine-3'-phosphate
  modified_base 15: mod_base = OTHER; note = 2'-O-methyladenosine-3'-phosphate
  modified_base 16: mod_base = OTHER; note = 2'-fluoroadenosine-3'-phosphate
  modified_base 17: mod_base = OTHER; note = 2'-O-methyluridine-3'-phosphate
  modified_base 18: mod_base = OTHER; note = 2'-O-methylguanosine-3'-phosphate
  modified_base 19: mod_base = OTHER; note = 2'-O-methyladenosine-3'-phosphate
  modified_base 20: mod_base = OTHER; note = 2'-O-methyladenosine-3'-phosphate
  modified_base 21: mod_base = OTHER; note = 2'-O-methyladenosine-3'- phosphorothioate
  modified_base 22: mod_base = OTHER; note = 2'-O-methyluridine-3'-phosphorothioate
  modified_base 23: mod_base = OTHER; note = 2'-O-methylguanosine-3'-phosphate
  misc_feature 1..4: note = RNA
  misc_feature 5: note = DNA
  misc_feature 6..23: note = RNA
ttgatcatgaactaaatgaaatg

SEQ ID NO: 1193 - DNA, 23 bp, synthetic construct
  source 1..23: mol_type = other DNA
  modified_base 1: mod_base = OTHER; note = Vinyl-phosphonate 2'-O-methyluridine-3'-phosphorothioate
  modified_base 2: mod_base = OTHER; note = 2'-fluorocytidine-3'-phosphorothioate
  modified_base 3: mod_base = OTHER; note = 2'-O-methylguanosine-3'-phosphate
  modified_base 4: mod_base = OTHER; note = 2'-O-methyluridine-3'-phosphate
  modified_base 6: mod_base = OTHER; note = 2'-O-methyladenosine-3'-phosphate
  modified_base 7: mod_base = OTHER; note = Thymidine-glycol nucleic acid (GNA) S-Isomer
  modified_base 8: mod_base = OTHER; note = 2'-O-methylcytidine-3'-phosphate
  modified_base 9: mod_base = OTHER; note = 2'-O-methyladenosine-3'-phosphate
  modified_base 10: mod_base = OTHER; note = 2'-O-methyluridine-3'-phosphate
  modified_base 11: mod_base = OTHER; note = 2'-O-methylguanosine-3'-phosphate
  modified_base 12: mod_base = OTHER; note = 2'-O-methyladenosine-3'-phosphate
  modified_base 13: mod_base = OTHER; note = 2'-O-methyladenosine-3'-phosphate
  modified_base 14: mod_base = OTHER; note = 2'-fluorocytidine-3'-phosphate
  modified_base 15: mod_base = OTHER; note = 2'-O-methyluridine-3'-phosphate
  modified_base 16: mod_base = OTHER; note = 2'-fluoroadenosine-3'-phosphate
  modified_base 17: mod_base = OTHER; note = 2'-O-methyladenosine-3'-phosphate
  modified_base 18: mod_base = OTHER; note = 2'-O-methyladenosine-3'-phosphate
  modified_base 19: mod_base = OTHER; note = 2'-O-methyluridine-3'-phosphate
  modified_base 20: mod_base = OTHER; note = 2'-O-methylguanosine-3'-phosphate
  modified_base 21: mod_base = OTHER; note = 2'-O-methyladenosine-3'- phosphorothioate
  modified_base 22: mod_base = OTHER; note = 2'-O-methyladenosine-3'- phosphorothioate
  modified_base 23: mod_base = OTHER; note = 2'-O-methyladenosine-3'-phosphate
  misc_feature 1..4: note = RNA
  misc_feature 5: note = DNA
  misc_feature 6: note = RNA
  misc_feature 7: note = DNA
  misc_feature 8..23: note = RNA
tcgtgatcatgaactaaatgaaa

SEQ ID NO: 1194 - RNA, 23 nt, synthetic construct
  source 1..23: mol_type = other RNA
  modified_base 1: mod_base = OTHER; note = Vinyl-phosphonate 2'-O-methyluridine-3'-phosphorothioate
  modified_base 2: mod_base = OTHER; note = 2'-fluorocytidine-3'-phosphorothioate
  modified_base 3: mod_base = OTHER; note = 2'-O-methylguanosine-3'-phosphate
  modified_base 4: mod_base = OTHER; note = 2'-O-methyluridine-3'-phosphate
  modified_base 5: mod_base = OTHER; note = 2'-O-methylguanosine-3'-phosphate
  modified_base 6: mod_base = OTHER; note = 2'-fluoroadenosine-3'-phosphate
  modified_base 7: mod_base = OTHER; note = 2'-O-methyluridine-3'-phosphate
  modified_base 8: mod_base = OTHER; note = 2'-fluorocytidine-3'-phosphate
  modified_base 9: mod_base = OTHER; note = 2'-fluoroadenosine-3'-phosphate
  modified_base 10: mod_base = OTHER; note = 2'-O-methyluridine-3'-phosphate
  modified_base 11: mod_base = OTHER; note = 2'-O-methylguanosine-3'-phosphate
  modified_base 12: mod_base = OTHER; note = 2'-O-methyladenosine-3'-phosphate
  modified_base 13: mod_base = OTHER; note = 2'-O-methyladenosine-3'-phosphate
  modified_base 14: mod_base = OTHER; note = 2'-fluorocytidine-3'-phosphate
  modified_base 15: mod_base = OTHER; note = 2'-O-methyluridine-3'-phosphate
  modified_base 16: mod_base = OTHER; note = 2'-fluoroadenosine-3'-phosphate
  modified_base 17: mod_base = OTHER; note = 2'-O-methyladenosine-3'-phosphate
  modified_base 18: mod_base = OTHER; note = 2'-O-methyladenosine-3'-phosphate
  modified_base 19: mod_base = OTHER; note = 2'-O-methyluridine-3'-phosphate
  modified_base 20: mod_base = OTHER; note = 2'-O-methylguanosine-3'-phosphate
  modified_base 21: mod_base = OTHER; note = 2'-O-methyladenosine-3'- phosphorothioate
  modified_base 22: mod_base = OTHER; note = 2'-O-methyladenosine-3'- phosphorothioate
  modified_base 23: mod_base = OTHER; note = 2'-O-methyladenosine-3'-phosphate
tcgtgatcatgaactaaatgaaa

SEQ ID NO: 1195 - DNA, 23 bp, synthetic construct
  source 1..23: mol_type = other DNA
  modified_base 1: mod_base = OTHER; note = Vinyl-phosphonate 2'-O-methyluridine-3'-phosphorothioate
  modified_base 2: mod_base = OTHER; note = 2'-fluorocytidine-3'-phosphorothioate
  modified_base 3: mod_base = OTHER; note = 2'-O-methylcytidine-3'-phosphate
  modified_base 4: mod_base = OTHER; note = 2'-O-methylguanosine-3'-phosphate
  modified_base 6: mod_base = OTHER; note = 2'-O-methylguanosine-3'-phosphate
  modified_base 7: mod_base = OTHER; note = Adenosine-glycol nucleic acid (GNA) S-Isomer
  modified_base 8: mod_base = OTHER; note = 2'-O-methyluridine-3'-phosphate
  modified_base 9: mod_base = OTHER; note = 2'-O-methylcytidine-3'-phosphate
  modified_base 10: mod_base = OTHER; note = 2'-O-methyladenosine-3'-phosphate
  modified_base 11: mod_base = OTHER; note = 2'-O-methyluridine-3'-phosphate
  modified_base 12: mod_base = OTHER; note = 2'-O-methylguanosine-3'-phosphate
  modified_base 13: mod_base = OTHER; note = 2'-O-methyladenosine-3'-phosphate
  modified_base 14: mod_base = OTHER; note = 2'-fluoroadenosine-3'-phosphate
  modified_base 15: mod_base = OTHER; note = 2'-O-methylcytidine-3'-phosphate
  modified_base 16: mod_base = OTHER; note = 2'-fluorouridine-3'-phosphate
  modified_base 17: mod_base = OTHER; note = 2'-O-methyladenosine-3'-phosphate
  modified_base 18: mod_base = OTHER; note = 2'-O-methyladenosine-3'-phosphate
  modified_base 19: mod_base = OTHER; note = 2'-O-methyladenosine-3'-phosphate
  modified_base 20: mod_base = OTHER; note = 2'-O-methyluridine-3'-phosphate
  modified_base 21: mod_base = OTHER; note = 2'-O-methylguanosine-3'- phosphorothioate
  modified_base 22: mod_base = OTHER; note = 2'-O-methyladenosine-3'- phosphorothioate
  modified_base 23: mod_base = OTHER; note = 2'-O-methyladenosine-3'-phosphate
  misc_feature 1..4: note = RNA
  misc_feature 5: note = DNA
  misc_feature 6..23: note = RNA
tccgtgatcatgaactaaatgaa

SEQ ID NO: 1196 - RNA, 23 nt, synthetic construct
  source 1..23: mol_type = other RNA
  modified_base 1: mod_base = OTHER; note = Vinyl-phosphonate 2'-O-methyluridine-3'-phosphorothioate
  modified_base 2: mod_base = OTHER; note = 2'-fluorocytidine-3'-phosphorothioate
  modified_base 3: mod_base = OTHER; note = 2'-O-methylcytidine-3'-phosphate
  modified_base 4: mod_base = OTHER; note = 2'-O-methylguanosine-3'-phosphate
  modified_base 5: mod_base = OTHER; note = 2'-O-methyluridine-3'-phosphate
  modified_base 6: mod_base = OTHER; note = 2'-fluoroguanosine-3'-phosphate
  modified_base 7: mod_base = OTHER; note = 2'-O-methyladenosine-3'-phosphate
  modified_base 8: mod_base = OTHER; note = 2'-fluorouridine-3'-phosphate
  modified_base 9: mod_base = OTHER; note = 2'-fluorocytidine-3'-phosphate
  modified_base 10: mod_base = OTHER; note = 2'-O-methyladenosine-3'-phosphate
  modified_base 11: mod_base = OTHER; note = 2'-O-methyluridine-3'-phosphate
  modified_base 12: mod_base = OTHER; note = 2'-O-methylguanosine-3'-phosphate
  modified_base 13: mod_base = OTHER; note = 2'-O-methyladenosine-3'-phosphate
  modified_base 14: mod_base = OTHER; note = 2'-fluoroadenosine-3'-phosphate
  modified_base 15: mod_base = OTHER; note = 2'-O-methylcytidine-3'-phosphate
  modified_base 16: mod_base = OTHER; note = 2'-fluorouridine-3'-phosphate
  modified_base 17: mod_base = OTHER; note = 2'-O-methyladenosine-3'-phosphate
  modified_base 18: mod_base = OTHER; note = 2'-O-methyladenosine-3'-phosphate
  modified_base 19: mod_base = OTHER; note = 2'-O-methyladenosine-3'-phosphate
  modified_base 20: mod_base = OTHER; note = 2'-O-methyluridine-3'-phosphate
  modified_base 21: mod_base = OTHER; note = 2'-O-methylguanosine-3'- phosphorothioate
  modified_base 22: mod_base = OTHER; note = 2'-O-methyladenosine-3'- phosphorothioate
  modified_base 23: mod_base = OTHER; note = 2'-O-methyladenosine-3'-phosphate
tccgtgatcatgaactaaatgaa

SEQ ID NO: 1197 - DNA, 23 bp, synthetic construct
  source 1..23: mol_type = other DNA
  modified_base 1: mod_base = OTHER; note = Vinyl-phosphonate 2'-O-methyluridine-3'-phosphorothioate
  modified_base 2: mod_base = OTHER; note = 2'-deoxycytidine-3'-phosphorothioate
  modified_base 3: mod_base = OTHER; note = 2'-O-methylcytidine-3'-phosphate
  modified_base 4: mod_base = OTHER; note = 2'-O-methylguanosine-3'-phosphate
  modified_base 6: mod_base = OTHER; note = 2'-O-methylguanosine-3'-phosphate
  modified_base 8: mod_base = OTHER; note = 2'-O-methyluridine-3'-phosphate
  modified_base 9: mod_base = OTHER; note = 2'-O-methylcytidine-3'-phosphate
  modified_base 10: mod_base = OTHER; note = 2'-O-methyladenosine-3'-phosphate
  modified_base 11: mod_base = OTHER; note = 2'-O-methyluridine-3'-phosphate
  modified_base 13: mod_base = OTHER; note = 2'-O-methyladenosine-3'-phosphate
  modified_base 14: mod_base = OTHER; note = 2'-fluoroadenosine-3'-phosphate
  modified_base 15: mod_base = OTHER; note = 2'-O-methylcytidine-3'-phosphate
  modified_base 16: mod_base = OTHER; note = 2'-O-methyluridine-3'-phosphate
  modified_base 17: mod_base = OTHER; note = 2'-O-methyladenosine-3'-phosphate
  modified_base 18: mod_base = OTHER; note = 2'-O-methyladenosine-3'-phosphate
  modified_base 19: mod_base = OTHER; note = 2'-O-methyladenosine-3'-phosphate
  modified_base 20: mod_base = OTHER; note = 2'-O-methyluridine-3'-phosphate
  modified_base 21: mod_base = OTHER; note = 2'-O-methylguanosine-3'- phosphorothioate
  modified_base 22: mod_base = OTHER; note = 2'-O-methyladenosine-3'- phosphorothioate
  modified_base 23: mod_base = OTHER; note = 2'-O-methyladenosine-3'-phosphate
  misc_feature 1: note = RNA
  misc_feature 2: note = DNA
  misc_feature 3..4: note = RNA
  misc_feature 5: note = DNA
  misc_feature 6: note = RNA
  misc_feature 7: note = DNA
  misc_feature 8..11: note = RNA
  misc_feature 12: note = DNA
  misc_feature 13..23: note = RNA
tccgtgatcatgaactaaatgaa

SEQ ID NO: 1198 - RNA, 23 nt, synthetic construct
  source 1..23: mol_type = other RNA
  modified_base 1: mod_base = OTHER; note = Vinyl-phosphonate 2'-O-methyluridine-3'-phosphorothioate
  modified_base 2: mod_base = OTHER; note = 2'-fluoroadenosine-3'-phosphorothioate
  modified_base 3: mod_base = OTHER; note = 2'-O-methylcytidine-3'-phosphate
  modified_base 4: mod_base = OTHER; note = 2'-O-methylcytidine-3'-phosphate
  modified_base 5: mod_base = OTHER; note = 2'-O-methylguanosine-3'-phosphate
  modified_base 6: mod_base = OTHER; note = 2'-fluorouridine-3'-phosphate
  modified_base 7: mod_base = OTHER; note = 2'-O-methylguanosine-3'-phosphate
  modified_base 8: mod_base = OTHER; note = 2'-fluoroadenosine-3'-phosphate
  modified_base 9: mod_base = OTHER; note = 2'-fluorouridine-3'-phosphate
  modified_base 10: mod_base = OTHER; note = 2'-O-methylcytidine-3'-phosphate
  modified_base 11: mod_base = OTHER; note = 2'-O-methyladenosine-3'-phosphate
  modified_base 12: mod_base = OTHER; note = 2'-O-methyluridine-3'-phosphate
  modified_base 13: mod_base = OTHER; note = 2'-O-methylguanosine-3'-phosphate
  modified_base 14: mod_base = OTHER; note = 2'-fluoroadenosine-3'-phosphate
  modified_base 15: mod_base = OTHER; note = 2'-O-methyladenosine-3'-phosphate
  modified_base 16: mod_base = OTHER; note = 2'-fluorocytidine-3'-phosphate
  modified_base 17: mod_base = OTHER; note = 2'-O-methyluridine-3'-phosphate
  modified_base 18: mod_base = OTHER; note = 2'-O-methyladenosine-3'-phosphate
  modified_base 19: mod_base = OTHER; note = 2'-O-methyladenosine-3'-phosphate
  modified_base 20: mod_base = OTHER; note = 2'-O-methyladenosine-3'-phosphate
  modified_base 21: mod_base = OTHER; note = 2'-O-methyluridine-3'-phosphorothioate
  modified_base 22: mod_base = OTHER; note = 2'-O-methylguanosine-3'- phosphorothioate
  modified_base 23: mod_base = OTHER; note = 2'-O-methyladenosine-3'-phosphate
taccgtgatcatgaactaaatga

SEQ ID NO: 1199 - DNA, 23 bp, synthetic construct
  source 1..23: mol_type = other DNA
  modified_base 1: mod_base = OTHER; note = Vinyl-phosphonate 2'-O-methyluridine-3'-phosphorothioate
  modified_base 2: mod_base = OTHER; note = 2'-deoxyadenosine-3'-phosphorothioate
  modified_base 3: mod_base = OTHER; note = 2'-O-methylcytidine-3'-phosphate
  modified_base 4: mod_base = OTHER; note = 2'-O-methylcytidine-3'-phosphate
  modified_base 6: mod_base = OTHER; note = 2'-O-methyluridine-3'-phosphate
  modified_base 8: mod_base = OTHER; note = 2'-O-methyladenosine-3'-phosphate
  modified_base 9: mod_base = OTHER; note = 2'-O-methyluridine-3'-phosphate
  modified_base 10: mod_base = OTHER; note = 2'-O-methylcytidine-3'-phosphate
  modified_base 11: mod_base = OTHER; note = 2'-O-methyladenosine-3'-phosphate
  modified_base 13: mod_base = OTHER; note = 2'-O-methylguanosine-3'-phosphate
  modified_base 14: mod_base = OTHER; note = 2'-fluoroadenosine-3'-phosphate
  modified_base 15: mod_base = OTHER; note = 2'-O-methyladenosine-3'-phosphate
  modified_base 16: mod_base = OTHER; note = 2'-O-methylcytidine-3'-phosphate
  modified_base 17: mod_base = OTHER; note = 2'-O-methyluridine-3'-phosphate
  modified_base 18: mod_base = OTHER; note = 2'-O-methyladenosine-3'-phosphate
  modified_base 19: mod_base = OTHER; note = 2'-O-methyladenosine-3'-phosphate
  modified_base 20: mod_base = OTHER; note = 2'-O-methyladenosine-3'-phosphate
  modified_base 21: mod_base = OTHER; note = 2'-O-methyluridine-3'-phosphorothioate
  modified_base 22: mod_base = OTHER; note = 2'-O-methylguanosine-3'- phosphorothioate
  modified_base 23: mod_base = OTHER; note = 2'-O-methyladenosine-3'-phosphate
  misc_feature 1: note = RNA
  misc_feature 2: note = DNA
  misc_feature 3..4: note = RNA
  misc_feature 5: note = DNA
  misc_feature 6: note = RNA
  misc_feature 7: note = DNA
  misc_feature 8..11: note = RNA
  misc_feature 12: note = DNA
  misc_feature 13..23: note = RNA
taccgtgatcatgaactaaatga

SEQ ID NO: 1200 - RNA, 23 nt, synthetic construct
  source 1..23: mol_type = other RNA
  modified_base 1: mod_base = OTHER; note = Vinyl-phosphonate 2'-O-methyluridine-3'-phosphorothioate
  modified_base 2: mod_base = OTHER; note = 2'-fluorocytidine-3'-phosphorothioate
  modified_base 3: mod_base = OTHER; note = 2'-O-methyladenosine-3'-phosphate
  modified_base 4: mod_base = OTHER; note = 2'-O-methylcytidine-3'-phosphate
  modified_base 5: mod_base = OTHER; note = 2'-O-methylcytidine-3'-phosphate
  modified_base 6: mod_base = OTHER; note = 2'-fluoroguanosine-3'-phosphate
  modified_base 7: mod_base = OTHER; note = 2'-O-methyluridine-3'-phosphate
  modified_base 8: mod_base = OTHER; note = 2'-fluoroguanosine-3'-phosphate
  modified_base 9: mod_base = OTHER; note = 2'-fluoroadenosine-3'-phosphate
  modified_base 10: mod_base = OTHER; note = 2'-O-methyluridine-3'-phosphate
  modified_base 11: mod_base = OTHER; note = 2'-O-methylcytidine-3'-phosphate
  modified_base 12: mod_base = OTHER; note = 2'-O-methyladenosine-3'-phosphate
  modified_base 13: mod_base = OTHER; note = 2'-O-methyluridine-3'-phosphate
  modified_base 14: mod_base = OTHER; note = 2'-fluoroguanosine-3'-phosphate
  modified_base 15: mod_base = OTHER; note = 2'-O-methyladenosine-3'-phosphate
  modified_base 16: mod_base = OTHER; note = 2'-fluoroadenosine-3'-phosphate
  modified_base 17: mod_base = OTHER; note = 2'-O-methylcytidine-3'-phosphate
  modified_base 18: mod_base = OTHER; note = 2'-O-methyluridine-3'-phosphate
  modified_base 19: mod_base = OTHER; note = 2'-O-methyladenosine-3'-phosphate
  modified_base 20: mod_base = OTHER; note = 2'-O-methyladenosine-3'-phosphate
  modified_base 21: mod_base = OTHER; note = 2'-O-methyladenosine-3'- phosphorothioate
  modified_base 22: mod_base = OTHER; note = 2'-O-methyluridine-3'-phosphorothioate
  modified_base 23: mod_base = OTHER; note = 2'-O-methylguanosine-3'-phosphate
tcaccgtgatcatgaactaaatg

SEQ ID NO: 1201 - DNA, 23 bp, synthetic construct
  source 1..23: mol_type = other DNA
  modified_base 1: mod_base = OTHER; note = Vinyl-phosphonate 2'-O-methyluridine-3'-phosphorothioate
  modified_base 2: mod_base = OTHER; note = 2'-deoxycytidine-3'-phosphorothioate
  modified_base 3: mod_base = OTHER; note = 2'-O-methyladenosine-3'-phosphate
  modified_base 4: mod_base = OTHER; note = 2'-O-methylcytidine-3'-phosphate
  modified_base 6: mod_base = OTHER; note = 2'-O-methylguanosine-3'-phosphate
  modified_base 8: mod_base = OTHER; note = 2'-O-methylguanosine-3'-phosphate
  modified_base 9: mod_base = OTHER; note = 2'-O-methyladenosine-3'-phosphate
  modified_base 10: mod_base = OTHER; note = 2'-O-methyluridine-3'-phosphate
  modified_base 11: mod_base = OTHER; note = 2'-O-methylcytidine-3'-phosphate
  modified_base 13: mod_base = OTHER; note = 2'-O-methyluridine-3'-phosphate
  modified_base 14: mod_base = OTHER; note = 2'-fluoroguanosine-3'-phosphate
  modified_base 15: mod_base = OTHER; note = 2'-O-methyladenosine-3'-phosphate
  modified_base 16: mod_base = OTHER; note = 2'-O-methyladenosine-3'-phosphate
  modified_base 17: mod_base = OTHER; note = 2'-O-methylcytidine-3'-phosphate
  modified_base 18: mod_base = OTHER; note = 2'-O-methyluridine-3'-phosphate
  modified_base 19: mod_base = OTHER; note = 2'-O-methyladenosine-3'-phosphate
  modified_base 20: mod_base = OTHER; note = 2'-O-methyladenosine-3'-phosphate
  modified_base 21: mod_base = OTHER; note = 2'-O-methyladenosine-3'- phosphorothioate
  modified_base 22: mod_base = OTHER; note = 2'-O-methyluridine-3'-phosphorothioate
  modified_base 23: mod_base = OTHER; note = 2'-O-methylguanosine-3'-phosphate
  misc_feature 1: note = RNA
  misc_feature 2: note = DNA
  misc_feature 3..4: note = RNA
  misc_feature 5: note = DNA
  misc_feature 6: note = RNA
  misc_feature 7: note = DNA
  misc_feature 8..11: note = RNA
  misc_feature 12: note = DNA
  misc_feature 13..23: note = RNA
tcaccgtgatcatgaactaaatg

SEQ ID NO: 1202 - RNA, 23 nt, synthetic construct
  source 1..23: mol_type = other RNA
  modified_base 1: mod_base = OTHER; note = Vinyl-phosphonate 2'-O-methyluridine-3'-phosphorothioate
  modified_base 2: mod_base = OTHER; note = 2'-fluorocytidine-3'-phosphorothioate
  modified_base 3: mod_base = OTHER; note = 2'-O-methylcytidine-3'-phosphate
  modified_base 4: mod_base = OTHER; note = 2'-O-methyladenosine-3'-phosphate
  modified_base 5: mod_base = OTHER; note = 2'-O-methylcytidine-3'-phosphate
  modified_base 6: mod_base = OTHER; note = 2'-fluorocytidine-3'-phosphate
  modified_base 7: mod_base = OTHER; note = 2'-O-methylguanosine-3'-phosphate
  modified_base 8: mod_base = OTHER; note = 2'-fluorouridine-3'-phosphate
  modified_base 9: mod_base = OTHER; note = 2'-fluoroguanosine-3'-phosphate
  modified_base 10: mod_base = OTHER; note = 2'-O-methyladenosine-3'-phosphate
  modified_base 11: mod_base = OTHER; note = 2'-O-methyluridine-3'-phosphate
  modified_base 12: mod_base = OTHER; note = 2'-O-methylcytidine-3'-phosphate
  modified_base 13: mod_base = OTHER; note = 2'-O-methyladenosine-3'-phosphate
  modified_base 14: mod_base = OTHER; note = 2'-fluorouridine-3'-phosphate
  modified_base 15: mod_base = OTHER; note = 2'-O-methylguanosine-3'-phosphate
  modified_base 16: mod_base = OTHER; note = 2'-fluoroadenosine-3'-phosphate
  modified_base 17: mod_base = OTHER; note = 2'-O-methyladenosine-3'-phosphate
  modified_base 18: mod_base = OTHER; note = 2'-O-methylcytidine-3'-phosphate
  modified_base 19: mod_base = OTHER; note = 2'-O-methyluridine-3'-phosphate
  modified_base 20: mod_base = OTHER; note = 2'-O-methyladenosine-3'-phosphate
  modified_base 21: mod_base = OTHER; note = 2'-O-methyladenosine-3'- phosphorothioate
  modified_base 22: mod_base = OTHER; note = 2'-O-methyladenosine-3'- phosphorothioate
  modified_base 23: mod_base = OTHER; note = 2'-O-methyluridine-3'-phosphate
tccaccgtgatcatgaactaaat

SEQ ID NO: 1203 - DNA, 23 bp, synthetic construct
  source 1..23: mol_type = other DNA
  modified_base 1: mod_base = OTHER; note = Vinyl-phosphonate 2'-O-methyluridine-3'-phosphorothioate
  modified_base 2: mod_base = OTHER; note = 2'-deoxycytidine-3'-phosphorothioate
  modified_base 3: mod_base = OTHER; note = 2'-O-methylcytidine-3'-phosphate
  modified_base 4: mod_base = OTHER; note = 2'-O-methyladenosine-3'-phosphate
  modified_base 6: mod_base = OTHER; note = 2'-O-methylcytidine-3'-phosphate
  modified_base 8: mod_base = OTHER; note = 2'-O-methyluridine-3'-phosphate
  modified_base 9: mod_base = OTHER; note = 2'-O-methylguanosine-3'-phosphate
  modified_base 10: mod_base = OTHER; note = 2'-O-methyladenosine-3'-phosphate
  modified_base 11: mod_base = OTHER; note = 2'-O-methyluridine-3'-phosphate
  modified_base 13: mod_base = OTHER; note = 2'-O-methyladenosine-3'-phosphate
  modified_base 14: mod_base = OTHER; note = 2'-fluorouridine-3'-phosphate
  modified_base 15: mod_base = OTHER; note = 2'-O-methylguanosine-3'-phosphate
  modified_base 16: mod_base = OTHER; note = 2'-O-methyladenosine-3'-phosphate
  modified_base 17: mod_base = OTHER; note = 2'-O-methyladenosine-3'-phosphate
  modified_base 18: mod_base = OTHER; note = 2'-O-methylcytidine-3'-phosphate
  modified_base 19: mod_base = OTHER; note = 2'-O-methyluridine-3'-phosphate
  modified_base 20: mod_base = OTHER; note = 2'-O-methyladenosine-3'-phosphate
  modified_base 21: mod_base = OTHER; note = 2'-O-methyladenosine-3'- phosphorothioate
  modified_base 22: mod_base = OTHER; note = 2'-O-methyladenosine-3'- phosphorothioate
  modified_base 23: mod_base = OTHER; note = 2'-O-methyluridine-3'-phosphate
  misc_feature 1: note = RNA
  misc_feature 2: note = DNA
  misc_feature 3..4: note = RNA
  misc_feature 5: note = DNA
  misc_feature 6: note = RNA
  misc_feature 7: note = DNA
  misc_feature 8..11: note = RNA
  misc_feature 12: note = DNA
  misc_feature 13..23: note = RNA
tccaccgtgatcatgaactaaat

SEQ ID NO: 1204 - RNA, 23 nt, synthetic construct
  source 1..23: mol_type = other RNA
  modified_base 1: mod_base = OTHER; note = Vinyl-phosphonate 2'-O-methyluridine-3'-phosphorothioate
  modified_base 2: mod_base = OTHER; note = 2'-fluoroadenosine-3'-phosphorothioate
  modified_base 3: mod_base = OTHER; note = 2'-O-methylcytidine-3'-phosphate
  modified_base 4: mod_base = OTHER; note = 2'-O-methylcytidine-3'-phosphate
  modified_base 5: mod_base = OTHER; note = 2'-O-methyladenosine-3'-phosphate
  modified_base 6: mod_base = OTHER; note = 2'-fluorocytidine-3'-phosphate
  modified_base 7: mod_base = OTHER; note = 2'-O-methylcytidine-3'-phosphate
  modified_base 8: mod_base = OTHER; note = 2'-fluoroguanosine-3'-phosphate
  modified_base 9: mod_base = OTHER; note = 2'-fluorouridine-3'-phosphate
  modified_base 10: mod_base = OTHER; note = 2'-O-methylguanosine-3'-phosphate
  modified_base 11: mod_base = OTHER; note = 2'-O-methyladenosine-3'-phosphate
  modified_base 12: mod_base = OTHER; note = 2'-O-methyluridine-3'-phosphate
  modified_base 13: mod_base = OTHER; note = 2'-O-methylcytidine-3'-phosphate
  modified_base 14: mod_base = OTHER; note = 2'-fluoroadenosine-3'-phosphate
  modified_base 15: mod_base = OTHER; note = 2'-O-methyluridine-3'-phosphate
  modified_base 16: mod_base = OTHER; note = 2'-fluoroguanosine-3'-phosphate
  modified_base 17: mod_base = OTHER; note = 2'-O-methyladenosine-3'-phosphate
  modified_base 18: mod_base = OTHER; note = 2'-O-methyladenosine-3'-phosphate
  modified_base 19: mod_base = OTHER; note = 2'-O-methylcytidine-3'-phosphate
  modified_base 20: mod_base = OTHER; note = 2'-O-methyluridine-3'-phosphate
  modified_base 21: mod_base = OTHER; note = 2'-O-methyladenosine-3'- phosphorothioate
  modified_base 22: mod_base = OTHER; note = 2'-O-methyladenosine-3'- phosphorothioate
  modified_base 23: mod_base = OTHER; note = 2'-O-methyladenosine-3'-phosphate
taccaccgtgatcatgaactaaa

SEQ ID NO: 1205 - DNA, 23 bp, synthetic construct
  source 1..23: mol_type = other DNA
  modified_base 1: mod_base = OTHER; note = Vinyl-phosphonate 2'-O-methyluridine-3'-phosphorothioate
  modified_base 2: mod_base = OTHER; note = 2'-deoxyadenosine-3'-phosphorothioate
  modified_base 3: mod_base = OTHER; note = 2'-O-methylcytidine-3'-phosphate
  modified_base 4: mod_base = OTHER; note = 2'-O-methylcytidine-3'-phosphate
  modified_base 6: mod_base = OTHER; note = 2'-O-methylcytidine-3'-phosphate
  modified_base 8: mod_base = OTHER; note = 2'-O-methylguanosine-3'-phosphate
  modified_base 9: mod_base = OTHER; note = 2'-O-methyluridine-3'-phosphate
  modified_base 10: mod_base = OTHER; note = 2'-O-methylguanosine-3'-phosphate
  modified_base 11: mod_base = OTHER; note = 2'-O-methyladenosine-3'-phosphate
  modified_base 13: mod_base = OTHER; note = 2'-O-methylcytidine-3'-phosphate
  modified_base 14: mod_base = OTHER; note = 2'-fluoroadenosine-3'-phosphate
  modified_base 15: mod_base = OTHER; note = 2'-O-methyluridine-3'-phosphate
  modified_base 16: mod_base = OTHER; note = 2'-O-methylguanosine-3'-phosphate
  modified_base 17: mod_base = OTHER; note = 2'-O-methyladenosine-3'-phosphate
  modified_base 18: mod_base = OTHER; note = 2'-O-methyladenosine-3'-phosphate
  modified_base 19: mod_base = OTHER; note = 2'-O-methylcytidine-3'-phosphate
  modified_base 20: mod_base = OTHER; note = 2'-O-methyluridine-3'-phosphate
  modified_base 21: mod_base = OTHER; note = 2'-O-methyladenosine-3'- phosphorothioate
  modified_base 22: mod_base = OTHER; note = 2'-O-methyladenosine-3'- phosphorothioate
  modified_base 23: mod_base = OTHER; note = 2'-O-methyladenosine-3'-phosphate
  misc_feature 1: note = RNA
  misc_feature 2: note = DNA
  misc_feature 3..4: note = RNA
  misc_feature 5: note = DNA
  misc_feature 6: note = RNA
  misc_feature 7: note = DNA
  misc_feature 8..11: note = RNA
  misc_feature 12: note = DNA
  misc_feature 13..23: note = RNA
taccaccgtgatcatgaactaaa

SEQ ID NO: 1206 - RNA, 23 nt, synthetic construct
  source 1..23: mol_type = other RNA
  modified_base 1: mod_base = OTHER; note = Vinyl-phosphonate 2'-O-methyluridine-3'-phosphorothioate
  modified_base 2: mod_base = OTHER; note = 2'-fluorouridine -3'-phosphorothioate
  modified_base 3: mod_base = OTHER; note = 2'-O-methyladenosine-3'-phosphate
  modified_base 4: mod_base = OTHER; note = 2'-O-methylcytidine-3'-phosphate
  modified_base 5: mod_base = OTHER; note = 2'-O-methylcytidine-3'-phosphate
  modified_base 6: mod_base = OTHER; note = 2'-fluoroadenosine-3'-phosphate
  modified_base 7: mod_base = OTHER; note = 2'-O-methylcytidine-3'-phosphate
  modified_base 8: mod_base = OTHER; note = 2'-fluorocytidine-3'-phosphate
  modified_base 9: mod_base = OTHER; note = 2'-fluoroguanosine-3'-phosphate
  modified_base 10: mod_base = OTHER; note = 2'-O-methyluridine-3'-phosphate
  modified_base 11: mod_base = OTHER; note = 2'-O-methylguanosine-3'-phosphate
  modified_base 12: mod_base = OTHER; note = 2'-O-methyladenosine-3'-phosphate
  modified_base 13: mod_base = OTHER; note = 2'-O-methyluridine-3'-phosphate
  modified_base 14: mod_base = OTHER; note = 2'-fluorocytidine-3'-phosphate
  modified_base 15: mod_base = OTHER; note = 2'-O-methyladenosine-3'-phosphate
  modified_base 16: mod_base = OTHER; note = 2'-fluorouridine-3'-phosphate
  modified_base 17: mod_base = OTHER; note = 2'-O-methylguanosine-3'-phosphate
  modified_base 18: mod_base = OTHER; note = 2'-O-methyladenosine-3'-phosphate
  modified_base 19: mod_base = OTHER; note = 2'-O-methyladenosine-3'-phosphate
  modified_base 20: mod_base = OTHER; note = 2'-O-methylcytidine-3'-phosphate
  modified_base 21: mod_base = OTHER; note = 2'-O-methyluridine-3'-phosphorothioate
  modified_base 22: mod_base = OTHER; note = 2'-O-methyladenosine-3'- phosphorothioate
  modified_base 23: mod_base = OTHER; note = 2'-O-methyladenosine-3'-phosphate
ttaccaccgtgatcatgaactaa

SEQ ID NO: 1207 - RNA, 23 nt, synthetic construct
  source 1..23: mol_type = other RNA
  modified_base 1: mod_base = OTHER; note = Vinyl-phosphonate 2'-O-methyluridine-3'-phosphorothioate
  modified_base 2: mod_base = OTHER; note = 2'-fluorocytidine-3'-phosphorothioate
  modified_base 3: mod_base = OTHER; note = 2'-O-methyluridine-3'-phosphate
  modified_base 4: mod_base = OTHER; note = 2'-O-methyladenosine-3'-phosphate
  modified_base 5: mod_base = OTHER; note = 2'-O-methylcytidine-3'-phosphate
  modified_base 6: mod_base = OTHER; note = 2'-fluorocytidine-3'-phosphate
  modified_base 7: mod_base = OTHER; note = 2'-O-methyladenosine-3'-phosphate
  modified_base 8: mod_base = OTHER; note = 2'-fluorocytidine-3'-phosphate
  modified_base 9: mod_base = OTHER; note = 2'-fluorocytidine-3'-phosphate
  modified_base 10: mod_base = OTHER; note = 2'-O-methylguanosine-3'-phosphate
  modified_base 11: mod_base = OTHER; note = 2'-O-methyluridine-3'-phosphate
  modified_base 12: mod_base = OTHER; note = 2'-O-methylguanosine-3'-phosphate
  modified_base 13: mod_base = OTHER; note = 2'-O-methyladenosine-3'-phosphate
  modified_base 14: mod_base = OTHER; note = 2'-fluorouridine-3'-phosphate
  modified_base 15: mod_base = OTHER; note = 2'-O-methylcytidine-3'-phosphate
  modified_base 16: mod_base = OTHER; note = 2'-fluoroadenosine-3'-phosphate
  modified_base 17: mod_base = OTHER; note = 2'-O-methyluridine-3'-phosphate
  modified_base 18: mod_base = OTHER; note = 2'-O-methylguanosine-3'-phosphate
  modified_base 19: mod_base = OTHER; note = 2'-O-methyladenosine-3'-phosphate
  modified_base 20: mod_base = OTHER; note = 2'-O-methyladenosine-3'-phosphate
  modified_base 21: mod_base = OTHER; note = 2'-O-methylcytidine-3'- phosphorothioate
  modified_base 22: mod_base = OTHER; note = 2'-O-methyluridine-3'-phosphorothioate
  modified_base 23: mod_base = OTHER; note = 2'-O-methyladenosine-3'-phosphate
tctaccaccgtgatcatgaacta

SEQ ID NO: 1208 - DNA, 23 bp, synthetic construct
  source 1..23: mol_type = other DNA
  modified_base 1: mod_base = OTHER; note = Vinyl-phosphonate 2'-O-methyluridine-3'-phosphorothioate
  modified_base 2: mod_base = OTHER; note = 2'-deoxycytidine-3'-phosphorothioate
  modified_base 3: mod_base = OTHER; note = 2'-O-methyluridine-3'-phosphate
  modified_base 4: mod_base = OTHER; note = 2'-O-methyladenosine-3'-phosphate
  modified_base 6: mod_base = OTHER; note = 2'-O-methylcytidine-3'-phosphate
  modified_base 8: mod_base = OTHER; note = 2'-O-methylcytidine-3'-phosphate
  modified_base 9: mod_base = OTHER; note = 2'-O-methylcytidine-3'-phosphate
  modified_base 10: mod_base = OTHER; note = 2'-O-methylguanosine-3'-phosphate
  modified_base 11: mod_base = OTHER; note = 2'-O-methyluridine-3'-phosphate
  modified_base 13: mod_base = OTHER; note = 2'-O-methyladenosine-3'-phosphate
  modified_base 14: mod_base = OTHER; note = 2'-fluorouridine-3'-phosphate
  modified_base 15: mod_base = OTHER; note = 2'-O-methylcytidine-3'-phosphate
  modified_base 16: mod_base = OTHER; note = 2'-O-methyladenosine-3'-phosphate
  modified_base 17: mod_base = OTHER; note = 2'-O-methyluridine-3'-phosphate
  modified_base 18: mod_base = OTHER; note = 2'-O-methylguanosine-3'-phosphate
  modified_base 19: mod_base = OTHER; note = 2'-O-methyladenosine-3'-phosphate
  modified_base 20: mod_base = OTHER; note = 2'-O-methyladenosine-3'-phosphate
  modified_base 21: mod_base = OTHER; note = 2'-O-methylcytidine-3'- phosphorothioate
  modified_base 22: mod_base = OTHER; note = 2'-O-methyluridine-3'-phosphorothioate
  modified_base 23: mod_base = OTHER; note = 2'-O-methyladenosine-3'-phosphate
  misc_feature 1: note = RNA
  misc_feature 2: note = DNA
  misc_feature 3..4: note = RNA
  misc_feature 5: note = DNA
  misc_feature 6: note = RNA
  misc_feature 7: note = DNA
  misc_feature 8..11: note = RNA
  misc_feature 12: note = DNA
  misc_feature 13..23: note = RNA
tctaccaccgtgatcatgaacta

SEQ ID NO: 1209 - DNA, 23 bp, synthetic construct
  source 1..23: mol_type = other DNA
  modified_base 1: mod_base = OTHER; note = Vinyl-phosphonate 2'-O-methyluridine-3'-phosphorothioate
  modified_base 2: mod_base = OTHER; note = 2'-fluorouridine -3'-phosphorothioate
  modified_base 3: mod_base = OTHER; note = 2'-O-methyluridine-3'-phosphate
  modified_base 4: mod_base = OTHER; note = 2'-O-methyladenosine-3'-phosphate
  modified_base 6: mod_base = OTHER; note = 2'-O-methyluridine-3'-phosphate
  modified_base 7: mod_base = OTHER; note = Adenosine-glycol nucleic acid (GNA) S-Isomer
  modified_base 8: mod_base = OTHER; note = 2'-O-methylcytidine-3'-phosphate
  modified_base 9: mod_base = OTHER; note = 2'-O-methylcytidine-3'-phosphate
  modified_base 10: mod_base = OTHER; note = 2'-O-methyladenosine-3'-phosphate
  modified_base 11: mod_base = OTHER; note = 2'-O-methylcytidine-3'-phosphate
  modified_base 12: mod_base = OTHER; note = 2'-O-methylcytidine-3'-phosphate
  modified_base 13: mod_base = OTHER; note = 2'-O-methylguanosine-3'-phosphate
  modified_base 14: mod_base = OTHER; note = 2'-fluorouridine-3'-phosphate
  modified_base 15: mod_base = OTHER; note = 2'-O-methylguanosine-3'-phosphate
  modified_base 16: mod_base = OTHER; note = 2'-fluoroadenosine-3'-phosphate
  modified_base 17: mod_base = OTHER; note = 2'-O-methyluridine-3'-phosphate
  modified_base 18: mod_base = OTHER; note = 2'-O-methylcytidine-3'-phosphate
  modified_base 19: mod_base = OTHER; note = 2'-O-methyladenosine-3'-phosphate
  modified_base 20: mod_base = OTHER; note = 2'-O-methyluridine-3'-phosphate
  modified_base 21: mod_base = OTHER; note = 2'-O-methylguanosine-3'- phosphorothioate
  modified_base 22: mod_base = OTHER; note = 2'-O-methyladenosine-3'- phosphorothioate
  modified_base 23: mod_base = OTHER; note = 2'-O-methyladenosine-3'-phosphate
  misc_feature 1..4: note = RNA
  misc_feature 5: note = DNA
  misc_feature 6..23: note = RNA
tttactaccaccgtgatcatgaa

SEQ ID NO: 1210 - DNA, 23 bp, synthetic construct
  source 1..23: mol_type = other DNA
  modified_base 1: mod_base = OTHER; note = Vinyl-phosphonate 2'-O-methyluridine-3'-phosphorothioate
  modified_base 2: mod_base = OTHER; note = 2'-fluoroguanosine-3'-phosphorothioate
  modified_base 3: mod_base = OTHER; note = 2'-O-methyluridine-3'-phosphate
  modified_base 4: mod_base = OTHER; note = 2'-O-methyluridine-3'-phosphate
  modified_base 6: mod_base = OTHER; note = 2'-O-methylcytidine-3'-phosphate
  modified_base 7: mod_base = OTHER; note = Thymidine-glycol nucleic acid (GNA) S-Isomer
  modified_base 8: mod_base = OTHER; note = 2'-O-methyladenosine-3'-phosphate
  modified_base 9: mod_base = OTHER; note = 2'-O-methylcytidine-3'-phosphate
  modified_base 10: mod_base = OTHER; note = 2'-O-methylcytidine-3'-phosphate
  modified_base 11: mod_base = OTHER; note = 2'-O-methyladenosine-3'-phosphate
  modified_base 12: mod_base = OTHER; note = 2'-O-methylcytidine-3'-phosphate
  modified_base 13: mod_base = OTHER; note = 2'-O-methylcytidine-3'-phosphate
  modified_base 14: mod_base = OTHER; note = 2'-fluoroguanosine-3'-phosphate
  modified_base 15: mod_base = OTHER; note = 2'-O-methyluridine-3'-phosphate
  modified_base 16: mod_base = OTHER; note = 2'-fluoroguanosine-3'-phosphate
  modified_base 17: mod_base = OTHER; note = 2'-O-methyladenosine-3'-phosphate
  modified_base 18: mod_base = OTHER; note = 2'-O-methyluridine-3'-phosphate
  modified_base 19: mod_base = OTHER; note = 2'-O-methylcytidine-3'-phosphate
  modified_base 20: mod_base = OTHER; note = 2'-O-methyladenosine-3'-phosphate
  modified_base 21: mod_base = OTHER; note = 2'-O-methyluridine-3'-phosphorothioate
  modified_base 22: mod_base = OTHER; note = 2'-O-methylguanosine-3'- phosphorothioate
  modified_base 23: mod_base = OTHER; note = 2'-O-methyladenosine-3'-phosphate
  misc_feature 1..4: note = RNA
  misc_feature 5: note = DNA
  misc_feature 6: note = RNA
  misc_feature 7: note = DNA
  misc_feature 8..23: note = RNA
tgttactaccaccgtgatcatga

SEQ ID NO: 1211 - DNA, 23 bp, synthetic construct
  source 1..23: mol_type = other DNA
  modified_base 1: mod_base = OTHER; note = Vinyl-phosphonate 2'-O-methyluridine-3'-phosphorothioate
  modified_base 2: mod_base = OTHER; note = 2'-fluoroguanosine-3'-phosphorothioate
  modified_base 3: mod_base = OTHER; note = 2'-O-methyluridine-3'-phosphate
  modified_base 4: mod_base = OTHER; note = 2'-O-methylguanosine-3'-phosphate
  modified_base 6: mod_base = OTHER; note = 2'-O-methyluridine-3'-phosphate
  modified_base 7: mod_base = OTHER; note = Adenosine-glycol nucleic acid (GNA) S-Isomer
  modified_base 8: mod_base = OTHER; note = 2'-O-methylcytidine-3'-phosphate
  modified_base 9: mod_base = OTHER; note = 2'-O-methyluridine-3'-phosphate
  modified_base 10: mod_base = OTHER; note = 2'-O-methyladenosine-3'-phosphate
  modified_base 11: mod_base = OTHER; note = 2'-O-methylcytidine-3'-phosphate
  modified_base 12: mod_base = OTHER; note = 2'-O-methylcytidine-3'-phosphate
  modified_base 13: mod_base = OTHER; note = 2'-O-methyladenosine-3'-phosphate
  modified_base 14: mod_base = OTHER; note = 2'-fluorocytidine-3'-phosphate
  modified_base 15: mod_base = OTHER; note = 2'-O-methylcytidine-3'-phosphate
  modified_base 16: mod_base = OTHER; note = 2'-fluoroguanosine-3'-phosphate
  modified_base 17: mod_base = OTHER; note = 2'-O-methyluridine-3'-phosphate
  modified_base 18: mod_base = OTHER; note = 2'-O-methylguanosine-3'-phosphate
  modified_base 19: mod_base = OTHER; note = 2'-O-methyladenosine-3'-phosphate
  modified_base 20: mod_base = OTHER; note = 2'-O-methyluridine-3'-phosphate
  modified_base 21: mod_base = OTHER; note = 2'-O-methylcytidine-3'- phosphorothioate
  modified_base 22: mod_base = OTHER; note = 2'-O-methyladenosine-3'- phosphorothioate
  modified_base 23: mod_base = OTHER; note = 2'-O-methyluridine-3'-phosphate
  misc_feature 1..4: note = RNA
  misc_feature 5: note = DNA
  misc_feature 6..23: note = RNA
tgtgttactaccaccgtgatcat

SEQ ID NO: 1212 - RNA, 23 nt, synthetic construct
  source 1..23: mol_type = other RNA
  modified_base 1: mod_base = OTHER; note = Vinyl-phosphonate 2'-O-methyluridine-3'-phosphorothioate
  modified_base 2: mod_base = OTHER; note = 2'-fluoroguanosine-3'-phosphorothioate
  modified_base 3: mod_base = OTHER; note = 2'-O-methyluridine-3'-phosphate
  modified_base 4: mod_base = OTHER; note = 2'-O-methylguanosine-3'-phosphate
  modified_base 5: mod_base = OTHER; note = 2'-O-methyluridine-3'-phosphate
  modified_base 6: mod_base = OTHER; note = 2'-fluorouridine-3'-phosphate
  modified_base 7: mod_base = OTHER; note = 2'-O-methyladenosine-3'-phosphate
  modified_base 8: mod_base = OTHER; note = 2'-fluorocytidine-3'-phosphate
  modified_base 9: mod_base = OTHER; note = 2'-fluorouridine-3'-phosphate
  modified_base 10: mod_base = OTHER; note = 2'-O-methyladenosine-3'-phosphate
  modified_base 11: mod_base = OTHER; note = 2'-O-methylcytidine-3'-phosphate
  modified_base 12: mod_base = OTHER; note = 2'-O-methylcytidine-3'-phosphate
  modified_base 13: mod_base = OTHER; note = 2'-O-methyladenosine-3'-phosphate
  modified_base 14: mod_base = OTHER; note = 2'-fluorocytidine-3'-phosphate
  modified_base 15: mod_base = OTHER; note = 2'-O-methylcytidine-3'-phosphate
  modified_base 16: mod_base = OTHER; note = 2'-fluoroguanosine-3'-phosphate
  modified_base 17: mod_base = OTHER; note = 2'-O-methyluridine-3'-phosphate
  modified_base 18: mod_base = OTHER; note = 2'-O-methylguanosine-3'-phosphate
  modified_base 19: mod_base = OTHER; note = 2'-O-methyladenosine-3'-phosphate
  modified_base 20: mod_base = OTHER; note = 2'-O-methyluridine-3'-phosphate
  modified_base 21: mod_base = OTHER; note = 2'-O-methylcytidine-3'- phosphorothioate
  modified_base 22: mod_base = OTHER; note = 2'-O-methyladenosine-3'- phosphorothioate
  modified_base 23: mod_base = OTHER; note = 2'-O-methyluridine-3'-phosphate
tgtgttactaccaccgtgatcat

SEQ ID NO: 1213 - DNA, 23 bp, synthetic construct
  source 1..23: mol_type = other DNA
  modified_base 1: mod_base = OTHER; note = Vinyl-phosphonate 2'-O-methyluridine-3'-phosphorothioate
  modified_base 2: mod_base = OTHER; note = 2'-deoxyguanosine-3'-phosphorothioate
  modified_base 3: mod_base = OTHER; note = 2'-O-methyluridine-3'-phosphate
  modified_base 4: mod_base = OTHER; note = 2'-O-methylguanosine-3'-phosphate
  modified_base 6: mod_base = OTHER; note = 2'-O-methyluridine-3'-phosphate
  modified_base 8: mod_base = OTHER; note = 2'-O-methylcytidine-3'-phosphate
  modified_base 9: mod_base = OTHER; note = 2'-O-methyluridine-3'-phosphate
  modified_base 10: mod_base = OTHER; note = 2'-O-methyladenosine-3'-phosphate
  modified_base 11: mod_base = OTHER; note = 2'-O-methylcytidine-3'-phosphate
  modified_base 13: mod_base = OTHER; note = 2'-O-methyladenosine-3'-phosphate
  modified_base 14: mod_base = OTHER; note = 2'-fluorocytidine-3'-phosphate
  modified_base 15: mod_base = OTHER; note = 2'-O-methylcytidine-3'-phosphate
  modified_base 16: mod_base = OTHER; note = 2'-O-methylguanosine-3'-phosphate
  modified_base 17: mod_base = OTHER; note = 2'-O-methyluridine-3'-phosphate
  modified_base 18: mod_base = OTHER; note = 2'-O-methylguanosine-3'-phosphate
  modified_base 19: mod_base = OTHER; note = 2'-O-methyladenosine-3'-phosphate
  modified_base 20: mod_base = OTHER; note = 2'-O-methyluridine-3'-phosphate
  modified_base 21: mod_base = OTHER; note = 2'-O-methylcytidine-3'- phosphorothioate
  modified_base 22: mod_base = OTHER; note = 2'-O-methyladenosine-3'- phosphorothioate
  modified_base 23: mod_base = OTHER; note = 2'-O-methyluridine-3'-phosphate
  misc_feature 1: note = RNA
  misc_feature 2: note = DNA
  misc_feature 3..4: note = RNA
  misc_feature 5: note = DNA
  misc_feature 6: note = RNA
  misc_feature 7: note = DNA
  misc_feature 8..11: note = RNA
  misc_feature 12: note = DNA
  misc_feature 13..23: note = RNA
tgtgttactaccaccgtgatcat

SEQ ID NO: 1214 - DNA, 23 bp, synthetic construct
  source 1..23: mol_type = other DNA
  modified_base 1: mod_base = OTHER; note = Vinyl-phosphonate 2'-O-methyluridine-3'-phosphorothioate
  modified_base 2: mod_base = OTHER; note = 2'-fluorocytidine-3'-phosphorothioate
  modified_base 3: mod_base = OTHER; note = 2'-O-methylguanosine-3'-phosphate
  modified_base 4: mod_base = OTHER; note = 2'-O-methyluridine-3'-phosphate
  modified_base 6: mod_base = OTHER; note = 2'-O-methyluridine-3'-phosphate
  modified_base 7: mod_base = OTHER; note = Thymidine-glycol nucleic acid (GNA) S-Isomer
  modified_base 8: mod_base = OTHER; note = 2'-O-methyladenosine-3'-phosphate
  modified_base 9: mod_base = OTHER; note = 2'-O-methylcytidine-3'-phosphate
  modified_base 10: mod_base = OTHER; note = 2'-O-methyluridine-3'-phosphate
  modified_base 11: mod_base = OTHER; note = 2'-O-methyladenosine-3'-phosphate
  modified_base 12: mod_base = OTHER; note = 2'-O-methylcytidine-3'-phosphate
  modified_base 13: mod_base = OTHER; note = 2'-O-methylcytidine-3'-phosphate
  modified_base 14: mod_base = OTHER; note = 2'-fluoroadenosine-3'-phosphate
  modified_base 15: mod_base = OTHER; note = 2'-O-methylcytidine-3'-phosphate
  modified_base 16: mod_base = OTHER; note = 2'-fluorocytidine-3'-phosphate
  modified_base 17: mod_base = OTHER; note = 2'-O-methylguanosine-3'-phosphate
  modified_base 18: mod_base = OTHER; note = 2'-O-methyluridine-3'-phosphate
  modified_base 19: mod_base = OTHER; note = 2'-O-methylguanosine-3'-phosphate
  modified_base 20: mod_base = OTHER; note = 2'-O-methyladenosine-3'-phosphate
  modified_base 21: mod_base = OTHER; note = 2'-O-methyluridine-3'-phosphorothioate
  modified_base 22: mod_base = OTHER; note = 2'-O-methylcytidine-3'- phosphorothioate
  modified_base 23: mod_base = OTHER; note = 2'-O-methyladenosine-3'-phosphate
  misc_feature 1..4: note = RNA
  misc_feature 5: note = DNA
  misc_feature 6: note = RNA
  misc_feature 7: note = DNA
  misc_feature 8..23: note = RNA
tcgtgttactaccaccgtgatca

SEQ ID NO: 1215 - RNA, 23 nt, synthetic construct
  source 1..23: mol_type = other RNA
  modified_base 1: mod_base = OTHER; note = Vinyl-phosphonate 2'-O-methyluridine-3'-phosphorothioate
  modified_base 2: mod_base = OTHER; note = 2'-fluorocytidine-3'-phosphorothioate
  modified_base 3: mod_base = OTHER; note = 2'-O-methylguanosine-3'-phosphate
  modified_base 4: mod_base = OTHER; note = 2'-O-methyluridine-3'-phosphate
  modified_base 5: mod_base = OTHER; note = 2'-O-methylguanosine-3'-phosphate
  modified_base 6: mod_base = OTHER; note = 2'-fluorouridine-3'-phosphate
  modified_base 7: mod_base = OTHER; note = 2'-O-methyluridine-3'-phosphate
  modified_base 8: mod_base = OTHER; note = 2'-fluoroadenosine-3'-phosphate
  modified_base 9: mod_base = OTHER; note = 2'-fluorocytidine-3'-phosphate
  modified_base 10: mod_base = OTHER; note = 2'-O-methyluridine-3'-phosphate
  modified_base 11: mod_base = OTHER; note = 2'-O-methyladenosine-3'-phosphate
  modified_base 12: mod_base = OTHER; note = 2'-O-methylcytidine-3'-phosphate
  modified_base 13: mod_base = OTHER; note = 2'-O-methylcytidine-3'-phosphate
  modified_base 14: mod_base = OTHER; note = 2'-fluoroadenosine-3'-phosphate
  modified_base 15: mod_base = OTHER; note = 2'-O-methylcytidine-3'-phosphate
  modified_base 16: mod_base = OTHER; note = 2'-fluorocytidine-3'-phosphate
  modified_base 17: mod_base = OTHER; note = 2'-O-methylguanosine-3'-phosphate
  modified_base 18: mod_base = OTHER; note = 2'-O-methyluridine-3'-phosphate
  modified_base 19: mod_base = OTHER; note = 2'-O-methylguanosine-3'-phosphate
  modified_base 20: mod_base = OTHER; note = 2'-O-methyladenosine-3'-phosphate
  modified_base 21: mod_base = OTHER; note = 2'-O-methyluridine-3'-phosphorothioate
  modified_base 22: mod_base = OTHER; note = 2'-O-methylcytidine-3'- phosphorothioate
  modified_base 23: mod_base = OTHER; note = 2'-O-methyladenosine-3'-phosphate
tcgtgttactaccaccgtgatca

SEQ ID NO: 1216 - DNA, 23 bp, synthetic construct
  source 1..23: mol_type = other DNA
  modified_base 1: mod_base = OTHER; note = Vinyl-phosphonate 2'-O-methyluridine-3'-phosphorothioate
  modified_base 2: mod_base = OTHER; note = 2'-deoxycytidine-3'-phosphorothioate
  modified_base 3: mod_base = OTHER; note = 2'-O-methylguanosine-3'-phosphate
  modified_base 4: mod_base = OTHER; note = 2'-O-methyluridine-3'-phosphate
  modified_base 6: mod_base = OTHER; note = 2'-O-methyluridine-3'-phosphate
  modified_base 8: mod_base = OTHER; note = 2'-O-methyladenosine-3'-phosphate
  modified_base 9: mod_base = OTHER; note = 2'-O-methylcytidine-3'-phosphate
  modified_base 10: mod_base = OTHER; note = 2'-O-methyluridine-3'-phosphate
  modified_base 11: mod_base = OTHER; note = 2'-O-methyladenosine-3'-phosphate
  modified_base 13: mod_base = OTHER; note = 2'-O-methylcytidine-3'-phosphate
  modified_base 14: mod_base = OTHER; note = 2'-fluoroadenosine-3'-phosphate
  modified_base 15: mod_base = OTHER; note = 2'-O-methylcytidine-3'-phosphate
  modified_base 16: mod_base = OTHER; note = 2'-O-methylcytidine-3'-phosphate
  modified_base 17: mod_base = OTHER; note = 2'-O-methylguanosine-3'-phosphate
  modified_base 18: mod_base = OTHER; note = 2'-O-methyluridine-3'-phosphate
  modified_base 19: mod_base = OTHER; note = 2'-O-methylguanosine-3'-phosphate
  modified_base 20: mod_base = OTHER; note = 2'-O-methyladenosine-3'-phosphate
  modified_base 21: mod_base = OTHER; note = 2'-O-methyluridine-3'-phosphorothioate
  modified_base 22: mod_base = OTHER; note = 2'-O-methylcytidine-3'- phosphorothioate
  modified_base 23: mod_base = OTHER; note = 2'-O-methyladenosine-3'-phosphate
  misc_feature 1: note = RNA
  misc_feature 2: note = DNA
  misc_feature 3..4: note = RNA
  misc_feature 5: note = DNA
  misc_feature 6: note = RNA
  misc_feature 7: note = DNA
  misc_feature 8..11: note = RNA
  misc_feature 12: note = DNA
  misc_feature 13..23: note = RNA
tcgtgttactaccaccgtgatca

SEQ ID NO: 1217 - DNA, 23 bp, synthetic construct
  source 1..23: mol_type = other DNA
  modified_base 1: mod_base = OTHER; note = Vinyl-phosphonate 2'-O-methyluridine-3'-phosphorothioate
  modified_base 2: mod_base = OTHER; note = 2'-fluorouridine -3'-phosphorothioate
  modified_base 3: mod_base = OTHER; note = 2'-O-methylcytidine-3'-phosphate
  modified_base 4: mod_base = OTHER; note = 2'-O-methylguanosine-3'-phosphate
  modified_base 6: mod_base = OTHER; note = 2'-O-methylguanosine-3'-phosphate
  modified_base 7: mod_base = OTHER; note = Thymidine-glycol nucleic acid (GNA) S-Isomer
  modified_base 8: mod_base = OTHER; note = 2'-O-methyluridine-3'-phosphate
  modified_base 9: mod_base = OTHER; note = 2'-O-methyladenosine-3'-phosphate
  modified_base 10: mod_base = OTHER; note = 2'-O-methylcytidine-3'-phosphate
  modified_base 11: mod_base = OTHER; note = 2'-O-methyluridine-3'-phosphate
  modified_base 12: mod_base = OTHER; note = 2'-O-methyladenosine-3'-phosphate
  modified_base 13: mod_base = OTHER; note = 2'-O-methylcytidine-3'-phosphate
  modified_base 14: mod_base = OTHER; note = 2'-fluorocytidine-3'-phosphate
  modified_base 15: mod_base = OTHER; note = 2'-O-methyladenosine-3'-phosphate
  modified_base 16: mod_base = OTHER; note = 2'-fluorocytidine-3'-phosphate
  modified_base 17: mod_base = OTHER; note = 2'-O-methylcytidine-3'-phosphate
  modified_base 18: mod_base = OTHER; note = 2'-O-methylguanosine-3'-phosphate
  modified_base 19: mod_base = OTHER; note = 2'-O-methyluridine-3'-phosphate
  modified_base 20: mod_base = OTHER; note = 2'-O-methylguanosine-3'-phosphate
  modified_base 21: mod_base = OTHER; note = 2'-O-methyladenosine-3'- phosphorothioate
  modified_base 22: mod_base = OTHER; note = 2'-O-methyluridine-3'-phosphorothioate
  modified_base 23: mod_base = OTHER; note = 2'-O-methylcytidine-3'-phosphate
  misc_feature 1..4: note = RNA
  misc_feature 5: note = DNA
  misc_feature 6: note = RNA
  misc_feature 7: note = DNA
  misc_feature 8..23: note = RNA
ttcgtgttactaccaccgtgatc

SEQ ID NO: 1218 - RNA, 23 nt, synthetic construct
  source 1..23: mol_type = other RNA
  modified_base 1: mod_base = OTHER; note = Vinyl-phosphonate 2'-O-methyluridine-3'-phosphorothioate
  modified_base 2: mod_base = OTHER; note = 2'-fluoroadenosine-3'-phosphorothioate
  modified_base 3: mod_base = OTHER; note = 2'-O-methyluridine-3'-phosphate
  modified_base 4: mod_base = OTHER; note = 2'-O-methylcytidine-3'-phosphate
  modified_base 5: mod_base = OTHER; note = 2'-O-methylguanosine-3'-phosphate
  modified_base 6: mod_base = OTHER; note = 2'-fluorouridine-3'-phosphate
  modified_base 7: mod_base = OTHER; note = 2'-O-methylguanosine-3'-phosphate
  modified_base 8: mod_base = OTHER; note = 2'-fluorouridine-3'-phosphate
  modified_base 9: mod_base = OTHER; note = 2'-fluorouridine-3'-phosphate
  modified_base 10: mod_base = OTHER; note = 2'-O-methyladenosine-3'-phosphate
  modified_base 11: mod_base = OTHER; note = 2'-O-methylcytidine-3'-phosphate
  modified_base 12: mod_base = OTHER; note = 2'-O-methyluridine-3'-phosphate
  modified_base 13: mod_base = OTHER; note = 2'-O-methyladenosine-3'-phosphate
  modified_base 14: mod_base = OTHER; note = 2'-fluorocytidine-3'-phosphate
  modified_base 15: mod_base = OTHER; note = 2'-O-methylcytidine-3'-phosphate
  modified_base 16: mod_base = OTHER; note = 2'-fluoroadenosine-3'-phosphate
  modified_base 17: mod_base = OTHER; note = 2'-O-methylcytidine-3'-phosphate
  modified_base 18: mod_base = OTHER; note = 2'-O-methylcytidine-3'-phosphate
  modified_base 19: mod_base = OTHER; note = 2'-O-methylguanosine-3'-phosphate
  modified_base 20: mod_base = OTHER; note = 2'-O-methyluridine-3'-phosphate
  modified_base 21: mod_base = OTHER; note = 2'-O-methylguanosine-3'- phosphorothioate
  modified_base 22: mod_base = OTHER; note = 2'-O-methyladenosine-3'- phosphorothioate
  modified_base 23: mod_base = OTHER; note = 2'-O-methyluridine-3'-phosphate
tatcgtgttactaccaccgtgat

SEQ ID NO: 1219 - RNA, 23 nt, synthetic construct
  source 1..23: mol_type = other RNA
  modified_base 1: mod_base = OTHER; note = Vinyl-phosphonate 2'-O-methyluridine-3'-phosphorothioate
  modified_base 2: mod_base = OTHER; note = 2'-fluoroadenosine-3'-phosphorothioate
  modified_base 3: mod_base = OTHER; note = 2'-O-methyladenosine-3'-phosphate
  modified_base 4: mod_base = OTHER; note = 2'-O-methyluridine-3'-phosphate
  modified_base 5: mod_base = OTHER; note = 2'-O-methylcytidine-3'-phosphate
  modified_base 6: mod_base = OTHER; note = 2'-fluoroguanosine-3'-phosphate
  modified_base 7: mod_base = OTHER; note = 2'-O-methyluridine-3'-phosphate
  modified_base 8: mod_base = OTHER; note = 2'-fluoroguanosine-3'-phosphate
  modified_base 9: mod_base = OTHER; note = 2'-fluorouridine-3'-phosphate
  modified_base 10: mod_base = OTHER; note = 2'-O-methyluridine-3'-phosphate
  modified_base 11: mod_base = OTHER; note = 2'-O-methyladenosine-3'-phosphate
  modified_base 12: mod_base = OTHER; note = 2'-O-methylcytidine-3'-phosphate
  modified_base 13: mod_base = OTHER; note = 2'-O-methyluridine-3'-phosphate
  modified_base 14: mod_base = OTHER; note = 2'-fluoroadenosine-3'-phosphate
  modified_base 15: mod_base = OTHER; note = 2'-O-methylcytidine-3'-phosphate
  modified_base 16: mod_base = OTHER; note = 2'-fluorocytidine-3'-phosphate
  modified_base 17: mod_base = OTHER; note = 2'-O-methyladenosine-3'-phosphate
  modified_base 18: mod_base = OTHER; note = 2'-O-methylcytidine-3'-phosphate
  modified_base 19: mod_base = OTHER; note = 2'-O-methylcytidine-3'-phosphate
  modified_base 20: mod_base = OTHER; note = 2'-O-methylguanosine-3'-phosphate
  modified_base 21: mod_base = OTHER; note = 2'-O-methyluridine-3'-phosphorothioate
  modified_base 22: mod_base = OTHER; note = 2'-O-methylguanosine-3'- phosphorothioate
  modified_base 23: mod_base = OTHER; note = 2'-O-methyladenosine-3'-phosphate
taatcgtgttactaccaccgtga

SEQ ID NO: 1220 - DNA, 23 bp, synthetic construct
  source 1..23: mol_type = other DNA
  modified_base 1: mod_base = OTHER; note = Vinyl-phosphonate 2'-O-methyluridine-3'-phosphorothioate
  modified_base 2: mod_base = OTHER; note = 2'-deoxyadenosine-3'-phosphorothioate
  modified_base 3: mod_base = OTHER; note = 2'-O-methyladenosine-3'-phosphate
  modified_base 4: mod_base = OTHER; note = 2'-O-methyluridine-3'-phosphate
  modified_base 6: mod_base = OTHER; note = 2'-O-methylguanosine-3'-phosphate
  modified_base 8: mod_base = OTHER; note = 2'-O-methylguanosine-3'-phosphate
  modified_base 9: mod_base = OTHER; note = 2'-O-methyluridine-3'-phosphate
  modified_base 10: mod_base = OTHER; note = 2'-O-methyluridine-3'-phosphate
  modified_base 11: mod_base = OTHER; note = 2'-O-methyladenosine-3'-phosphate
  modified_base 13: mod_base = OTHER; note = 2'-O-methyluridine-3'-phosphate
  modified_base 14: mod_base = OTHER; note = 2'-fluoroadenosine-3'-phosphate
  modified_base 15: mod_base = OTHER; note = 2'-O-methylcytidine-3'-phosphate
  modified_base 16: mod_base = OTHER; note = 2'-O-methylcytidine-3'-phosphate
  modified_base 17: mod_base = OTHER; note = 2'-O-methyladenosine-3'-phosphate
  modified_base 18: mod_base = OTHER; note = 2'-O-methylcytidine-3'-phosphate
  modified_base 19: mod_base = OTHER; note = 2'-O-methylcytidine-3'-phosphate
  modified_base 20: mod_base = OTHER; note = 2'-O-methylguanosine-3'-phosphate
  modified_base 21: mod_base = OTHER; note = 2'-O-methyluridine-3'-phosphorothioate
  modified_base 22: mod_base = OTHER; note = 2'-O-methylguanosine-3'- phosphorothioate
  modified_base 23: mod_base = OTHER; note = 2'-O-methyladenosine-3'-phosphate
  misc_feature 1: note = RNA
  misc_feature 2: note = DNA
  misc_feature 3..4: note = RNA
  misc_feature 5: note = DNA
  misc_feature 6: note = RNA
  misc_feature 7: note = DNA
  misc_feature 8..11: note = RNA
  misc_feature 12: note = DNA
  misc_feature 13..23: note = RNA
taatcgtgttactaccaccgtga

SEQ ID NO: 1221 - DNA, 23 bp, synthetic construct
  source 1..23: mol_type = other DNA
  modified_base 1: mod_base = OTHER; note = Vinyl-phosphonate 2'-O-methyluridine-3'-phosphorothioate
  modified_base 2: mod_base = OTHER; note = 2'-fluoroguanosine-3'-phosphorothioate
  modified_base 3: mod_base = OTHER; note = 2'-O-methylcytidine-3'-phosphate
  modified_base 4: mod_base = OTHER; note = 2'-O-methyladenosine-3'-phosphate
  modified_base 6: mod_base = OTHER; note = 2'-O-methyladenosine-3'-phosphate
  modified_base 7: mod_base = OTHER; note = Thymidine-glycol nucleic acid (GNA) S-Isomer
  modified_base 8: mod_base = OTHER; note = 2'-O-methylcytidine-3'-phosphate
  modified_base 9: mod_base = OTHER; note = 2'-O-methyluridine-3'-phosphate
  modified_base 10: mod_base = OTHER; note = 2'-O-methylcytidine-3'-phosphate
  modified_base 11: mod_base = OTHER; note = 2'-O-methyluridine-3'-phosphate
  modified_base 12: mod_base = OTHER; note = 2'-O-methyluridine-3'-phosphate
  modified_base 13: mod_base = OTHER; note = 2'-O-methyladenosine-3'-phosphate
  modified_base 14: mod_base = OTHER; note = 2'-fluoroguanosine-3'-phosphate
  modified_base 15: mod_base = OTHER; note = 2'-O-methylguanosine-3'-phosphate
  modified_base 16: mod_base = OTHER; note = 2'-fluorouridine-3'-phosphate
  modified_base 17: mod_base = OTHER; note = 2'-O-methylguanosine-3'-phosphate
  modified_base 18: mod_base = OTHER; note = 2'-O-methylguanosine-3'-phosphate
  modified_base 19: mod_base = OTHER; note = 2'-O-methyluridine-3'-phosphate
  modified_base 20: mod_base = OTHER; note = 2'-O-methylguanosine-3'-phosphate
  modified_base 21: mod_base = OTHER; note = 2'-O-methylcytidine-3'- phosphorothioate
  modified_base 22: mod_base = OTHER; note = 2'-O-methyluridine-3'-phosphorothioate
  modified_base 23: mod_base = OTHER; note = 2'-O-methyluridine-3'-phosphate
  misc_feature 1..4: note = RNA
  misc_feature 5: note = DNA
  misc_feature 6: note = RNA
  misc_feature 7: note = DNA
  misc_feature 8..23: note = RNA
tgcagatctcttaggtggtgctt

SEQ ID NO: 1222 - DNA, 23 bp, synthetic construct
  source 1..23: mol_type = other DNA
  modified_base 1: mod_base = OTHER; note = Vinyl-phosphonate 2'-O-methyluridine-3'-phosphorothioate
  modified_base 2: mod_base = OTHER; note = 2'-fluoroadenosine-3'-phosphorothioate
  modified_base 3: mod_base = OTHER; note = 2'-O-methylguanosine-3'-phosphate
  modified_base 4: mod_base = OTHER; note = 2'-O-methylcytidine-3'-phosphate
  modified_base 6: mod_base = OTHER; note = 2'-O-methylguanosine-3'-phosphate
  modified_base 7: mod_base = OTHER; note = Adenosine-glycol nucleic acid (GNA) S-Isomer
  modified_base 8: mod_base = OTHER; note = 2'-O-methyluridine-3'-phosphate
  modified_base 9: mod_base = OTHER; note = 2'-O-methylcytidine-3'-phosphate
  modified_base 10: mod_base = OTHER; note = 2'-O-methyluridine-3'-phosphate
  modified_base 11: mod_base = OTHER; note = 2'-O-methylcytidine-3'-phosphate
  modified_base 12: mod_base = OTHER; note = 2'-O-methyluridine-3'-phosphate
  modified_base 13: mod_base = OTHER; note = 2'-O-methyluridine-3'-phosphate
  modified_base 14: mod_base = OTHER; note = 2'-fluoroadenosine-3'-phosphate
  modified_base 15: mod_base = OTHER; note = 2'-O-methylguanosine-3'-phosphate
  modified_base 16: mod_base = OTHER; note = 2'-fluoroguanosine-3'-phosphate
  modified_base 17: mod_base = OTHER; note = 2'-O-methyluridine-3'-phosphate
  modified_base 18: mod_base = OTHER; note = 2'-O-methylguanosine-3'-phosphate
  modified_base 19: mod_base = OTHER; note = 2'-O-methylguanosine-3'-phosphate
  modified_base 20: mod_base = OTHER; note = 2'-O-methyluridine-3'-phosphate
  modified_base 21: mod_base = OTHER; note = 2'-O-methylguanosine-3'- phosphorothioate
  modified_base 22: mod_base = OTHER; note = 2'-O-methylcytidine-3'- phosphorothioate
  modified_base 23: mod_base = OTHER; note = 2'-O-methyluridine-3'-phosphate
  misc_feature 1..4: note = RNA
  misc_feature 5: note = DNA
  misc_feature 6..23: note = RNA
tagcagatctcttaggtggtgct

SEQ ID NO: 1223 - DNA, 23 bp, synthetic construct
  source 1..23: mol_type = other DNA
  modified_base 1: mod_base = OTHER; note = Vinyl-phosphonate 2'-O-methyluridine-3'-phosphorothioate
  modified_base 2: mod_base = OTHER; note = 2'-fluorouridine -3'-phosphorothioate
  modified_base 3: mod_base = OTHER; note = 2'-O-methylguanosine-3'-phosphate
  modified_base 4: mod_base = OTHER; note = 2'-O-methyladenosine-3'-phosphate
  modified_base 6: mod_base = OTHER; note = 2'-O-methylcytidine-3'-phosphate
  modified_base 7: mod_base = OTHER; note = Adenosine-glycol nucleic acid (GNA) S-Isomer
  modified_base 8: mod_base = OTHER; note = 2'-O-methylguanosine-3'-phosphate
  modified_base 9: mod_base = OTHER; note = 2'-O-methyladenosine-3'-phosphate
  modified_base 10: mod_base = OTHER; note = 2'-O-methyluridine-3'-phosphate
  modified_base 11: mod_base = OTHER; note = 2'-O-methylcytidine-3'-phosphate
  modified_base 12: mod_base = OTHER; note = 2'-O-methyluridine-3'-phosphate
  modified_base 13: mod_base = OTHER; note = 2'-O-methylcytidine-3'-phosphate
  modified_base 14: mod_base = OTHER; note = 2'-fluorouridine-3'-phosphate
  modified_base 15: mod_base = OTHER; note = 2'-O-methyluridine-3'-phosphate
  modified_base 16: mod_base = OTHER; note = 2'-fluoroadenosine-3'-phosphate
  modified_base 17: mod_base = OTHER; note = 2'-O-methylguanosine-3'-phosphate
  modified_base 18: mod_base = OTHER; note = 2'-O-methylguanosine-3'-phosphate
  modified_base 19: mod_base = OTHER; note = 2'-O-methyluridine-3'-phosphate
  modified_base 20: mod_base = OTHER; note = 2'-O-methylguanosine-3'-phosphate
  modified_base 21: mod_base = OTHER; note = 2'-O-methylguanosine-3'- phosphorothioate
  modified_base 22: mod_base = OTHER; note = 2'-O-methyluridine-3'-phosphorothioate
  modified_base 23: mod_base = OTHER; note = 2'-O-methylguanosine-3'-phosphate
  misc_feature 1..4: note = RNA
  misc_feature 5: note = DNA
  misc_feature 6..23: note = RNA
ttgagcagatctcttaggtggtg

SEQ ID NO: 1224 - DNA, 23 bp, synthetic construct
  source 1..23: mol_type = other DNA
  modified_base 1: mod_base = OTHER; note = Vinyl-phosphonate 2'-O-methyluridine-3'-phosphorothioate
  modified_base 2: mod_base = OTHER; note = 2'-fluoroadenosine-3'-phosphorothioate
  modified_base 3: mod_base = OTHER; note = 2'-O-methylguanosine-3'-phosphate
  modified_base 4: mod_base = OTHER; note = 2'-O-methyladenosine-3'-phosphate
  modified_base 6: mod_base = OTHER; note = 2'-O-methylguanosine-3'-phosphate
  modified_base 7: mod_base = OTHER; note = Adenosine-glycol nucleic acid (GNA) S-Isomer
  modified_base 8: mod_base = OTHER; note = 2'-O-methylguanosine-3'-phosphate
  modified_base 9: mod_base = OTHER; note = 2'-O-methylcytidine-3'-phosphate
  modified_base 10: mod_base = OTHER; note = 2'-O-methyladenosine-3'-phosphate
  modified_base 11: mod_base = OTHER; note = 2'-O-methylguanosine-3'-phosphate
  modified_base 12: mod_base = OTHER; note = 2'-O-methyladenosine-3'-phosphate
  modified_base 13: mod_base = OTHER; note = 2'-O-methyluridine-3'-phosphate
  modified_base 14: mod_base = OTHER; note = 2'-fluorocytidine-3'-phosphate
  modified_base 15: mod_base = OTHER; note = 2'-O-methyluridine-3'-phosphate
  modified_base 16: mod_base = OTHER; note = 2'-fluorocytidine-3'-phosphate
  modified_base 17: mod_base = OTHER; note = 2'-O-methyluridine-3'-phosphate
  modified_base 18: mod_base = OTHER; note = 2'-O-methyluridine-3'-phosphate
  modified_base 19: mod_base = OTHER; note = 2'-O-methyladenosine-3'-phosphate
  modified_base 20: mod_base = OTHER; note = 2'-O-methylguanosine-3'-phosphate
  modified_base 21: mod_base = OTHER; note = 2'-O-methylguanosine-3'- phosphorothioate
  modified_base 22: mod_base = OTHER; note = 2'-O-methyluridine-3'-phosphorothioate
  modified_base 23: mod_base = OTHER; note = 2'-O-methylguanosine-3'-phosphate
  misc_feature 1..4: note = RNA
  misc_feature 5: note = DNA
  misc_feature 6..23: note = RNA
tagatgagcagatctcttaggtg

SEQ ID NO: 1225 - DNA, 23 bp, synthetic construct
  source 1..23: mol_type = other DNA
  modified_base 1: mod_base = OTHER; note = Vinyl-phosphonate 2'-O-methyluridine-3'-phosphorothioate
  modified_base 2: mod_base = OTHER; note = 2'-fluorouridine -3'-phosphorothioate
  modified_base 3: mod_base = OTHER; note = 2'-O-methyluridine-3'-phosphate
  modified_base 4: mod_base = OTHER; note = 2'-O-methyladenosine-3'-phosphate
  modified_base 6: mod_base = OTHER; note = 2'-O-methyladenosine-3'-phosphate
  modified_base 7: mod_base = OTHER; note = Thymidine-glycol nucleic acid (GNA) S-Isomer
  modified_base 8: mod_base = OTHER; note = 2'-O-methylguanosine-3'-phosphate
  modified_base 9: mod_base = OTHER; note = 2'-O-methyladenosine-3'-phosphate
  modified_base 10: mod_base = OTHER; note = 2'-O-methylguanosine-3'-phosphate
  modified_base 11: mod_base = OTHER; note = 2'-O-methylcytidine-3'-phosphate
  modified_base 12: mod_base = OTHER; note = 2'-O-methyladenosine-3'-phosphate
  modified_base 13: mod_base = OTHER; note = 2'-O-methylguanosine-3'-phosphate
  modified_base 14: mod_base = OTHER; note = 2'-fluoroadenosine-3'-phosphate
  modified_base 15: mod_base = OTHER; note = 2'-O-methyluridine-3'-phosphate
  modified_base 16: mod_base = OTHER; note = 2'-fluorocytidine-3'-phosphate
  modified_base 17: mod_base = OTHER; note = 2'-O-methyluridine-3'-phosphate
  modified_base 18: mod_base = OTHER; note = 2'-O-methylcytidine-3'-phosphate
  modified_base 19: mod_base = OTHER; note = 2'-O-methyluridine-3'-phosphate
  modified_base 20: mod_base = OTHER; note = 2'-O-methyluridine-3'-phosphate
  modified_base 21: mod_base = OTHER; note = 2'-O-methyladenosine-3'- phosphorothioate
  modified_base 22: mod_base = OTHER; note = 2'-O-methylguanosine-3'- phosphorothioate
  modified_base 23: mod_base = OTHER; note = 2'-O-methylguanosine-3'-phosphate
  misc_feature 1..4: note = RNA
  misc_feature 5: note = DNA
  misc_feature 6: note = RNA
  misc_feature 7: note = DNA
  misc_feature 8..23: note = RNA
tttagatgagcagatctcttagg

SEQ ID NO: 1226 - DNA, 23 bp, synthetic construct
  source 1..23: mol_type = other DNA
  modified_base 1: mod_base = OTHER; note = Vinyl-phosphonate 2'-O-methyluridine-3'-phosphorothioate
  modified_base 2: mod_base = OTHER; note = 2'-fluorocytidine-3'-phosphorothioate
  modified_base 3: mod_base = OTHER; note = 2'-O-methyluridine-3'-phosphate
  modified_base 4: mod_base = OTHER; note = 2'-O-methyluridine-3'-phosphate
  modified_base 6: mod_base = OTHER; note = 2'-O-methylguanosine-3'-phosphate
  modified_base 7: mod_base = OTHER; note = Adenosine-glycol nucleic acid (GNA) S-Isomer
  modified_base 8: mod_base = OTHER; note = 2'-O-methyluridine-3'-phosphate
  modified_base 9: mod_base = OTHER; note = 2'-O-methylguanosine-3'-phosphate
  modified_base 10: mod_base = OTHER; note = 2'-O-methyladenosine-3'-phosphate
  modified_base 11: mod_base = OTHER; note = 2'-O-methylguanosine-3'-phosphate
  modified_base 12: mod_base = OTHER; note = 2'-O-methylcytidine-3'-phosphate
  modified_base 13: mod_base = OTHER; note = 2'-O-methyladenosine-3'-phosphate
  modified_base 14: mod_base = OTHER; note = 2'-fluoroguanosine-3'-phosphate
  modified_base 15: mod_base = OTHER; note = 2'-O-methyladenosine-3'-phosphate
  modified_base 16: mod_base = OTHER; note = 2'-fluorouridine-3'-phosphate
  modified_base 17: mod_base = OTHER; note = 2'-O-methylcytidine-3'-phosphate
  modified_base 18: mod_base = OTHER; note = 2'-O-methyluridine-3'-phosphate
  modified_base 19: mod_base = OTHER; note = 2'-O-methylcytidine-3'-phosphate
  modified_base 20: mod_base = OTHER; note = 2'-O-methyluridine-3'-phosphate
  modified_base 21: mod_base = OTHER; note = 2'-O-methyluridine-3'-phosphorothioate
  modified_base 22: mod_base = OTHER; note = 2'-O-methyladenosine-3'- phosphorothioate
  modified_base 23: mod_base = OTHER; note = 2'-O-methylguanosine-3'-phosphate
  misc_feature 1..4: note = RNA
  misc_feature 5: note = DNA
  misc_feature 6..23: note = RNA
tcttagatgagcagatctcttag

SEQ ID NO: 1227 - RNA, 23 nt, synthetic construct
  source 1..23: mol_type = other RNA
  modified_base 1: mod_base = OTHER; note = Vinyl-phosphonate 2'-O-methyluridine-3'-phosphorothioate
  modified_base 2: mod_base = OTHER; note = 2'-fluorocytidine-3'-phosphorothioate
  modified_base 3: mod_base = OTHER; note = 2'-O-methyluridine-3'-phosphate
  modified_base 4: mod_base = OTHER; note = 2'-O-methyluridine-3'-phosphate
  modified_base 5: mod_base = OTHER; note = 2'-O-methyladenosine-3'-phosphate
  modified_base 6: mod_base = OTHER; note = 2'-fluoroguanosine-3'-phosphate
  modified_base 7: mod_base = OTHER; note = 2'-O-methyladenosine-3'-phosphate
  modified_base 8: mod_base = OTHER; note = 2'-fluorouridine-3'-phosphate
  modified_base 9: mod_base = OTHER; note = 2'-fluoroguanosine-3'-phosphate
  modified_base 10: mod_base = OTHER; note = 2'-O-methyladenosine-3'-phosphate
  modified_base 11: mod_base = OTHER; note = 2'-O-methylguanosine-3'-phosphate
  modified_base 12: mod_base = OTHER; note = 2'-O-methylcytidine-3'-phosphate
  modified_base 13: mod_base = OTHER; note = 2'-O-methyladenosine-3'-phosphate
  modified_base 14: mod_base = OTHER; note = 2'-fluoroguanosine-3'-phosphate
  modified_base 15: mod_base = OTHER; note = 2'-O-methyladenosine-3'-phosphate
  modified_base 16: mod_base = OTHER; note = 2'-fluorouridine-3'-phosphate
  modified_base 17: mod_base = OTHER; note = 2'-O-methylcytidine-3'-phosphate
  modified_base 18: mod_base = OTHER; note = 2'-O-methyluridine-3'-phosphate
  modified_base 19: mod_base = OTHER; note = 2'-O-methylcytidine-3'-phosphate
  modified_base 20: mod_base = OTHER; note = 2'-O-methyluridine-3'-phosphate
  modified_base 21: mod_base = OTHER; note = 2'-O-methyluridine-3'-phosphorothioate
  modified_base 22: mod_base = OTHER; note = 2'-O-methyladenosine-3'- phosphorothioate
  modified_base 23: mod_base = OTHER; note = 2'-O-methylguanosine-3'-phosphate
tcttagatgagcagatctcttag

SEQ ID NO: 1228 - DNA, 23 bp, synthetic construct
  source 1..23: mol_type = other DNA
  modified_base 1: mod_base = OTHER; note = Vinyl-phosphonate 2'-O-methyluridine-3'-phosphorothioate
  modified_base 2: mod_base = OTHER; note = 2'-deoxycytidine-3'-phosphorothioate
  modified_base 3: mod_base = OTHER; note = 2'-O-methyluridine-3'-phosphate
  modified_base 4: mod_base = OTHER; note = 2'-O-methyluridine-3'-phosphate
  modified_base 6: mod_base = OTHER; note = 2'-O-methylguanosine-3'-phosphate
  modified_base 8: mod_base = OTHER; note = 2'-O-methyluridine-3'-phosphate
  modified_base 9: mod_base = OTHER; note = 2'-O-methylguanosine-3'-phosphate
  modified_base 10: mod_base = OTHER; note = 2'-O-methyladenosine-3'-phosphate
  modified_base 11: mod_base = OTHER; note = 2'-O-methylguanosine-3'-phosphate
  modified_base 13: mod_base = OTHER; note = 2'-O-methyladenosine-3'-phosphate
  modified_base 14: mod_base = OTHER; note = 2'-fluoroguanosine-3'-phosphate
  modified_base 15: mod_base = OTHER; note = 2'-O-methyladenosine-3'-phosphate
  modified_base 16: mod_base = OTHER; note = 2'-O-methyluridine-3'-phosphate
  modified_base 17: mod_base = OTHER; note = 2'-O-methylcytidine-3'-phosphate
  modified_base 18: mod_base = OTHER; note = 2'-O-methyluridine-3'-phosphate
  modified_base 19: mod_base = OTHER; note = 2'-O-methylcytidine-3'-phosphate
  modified_base 20: mod_base = OTHER; note = 2'-O-methyluridine-3'-phosphate
  modified_base 21: mod_base = OTHER; note = 2'-O-methyluridine-3'-phosphorothioate
  modified_base 22: mod_base = OTHER; note = 2'-O-methyladenosine-3'- phosphorothioate
  modified_base 23: mod_base = OTHER; note = 2'-O-methylguanosine-3'-phosphate
  misc_feature 1: note = RNA
  misc_feature 2: note = DNA
  misc_feature 3..4: note = RNA
  misc_feature 5: note = DNA
  misc_feature 6: note = RNA
  misc_feature 7: note = DNA
  misc_feature 8..11: note = RNA
  misc_feature 12: note = DNA
  misc_feature 13..23: note = RNA
tcttagatgagcagatctcttag

SEQ ID NO: 1229 - RNA, 23 nt, synthetic construct
  source 1..23: mol_type = other RNA
  modified_base 1: mod_base = OTHER; note = Vinyl-phosphonate 2'-O-methyluridine-3'-phosphorothioate
  modified_base 2: mod_base = OTHER; note = 2'-fluoroguanosine-3'-phosphorothioate
  modified_base 3: mod_base = OTHER; note = 2'-O-methylcytidine-3'-phosphate
  modified_base 4: mod_base = OTHER; note = 2'-O-methyluridine-3'-phosphate
  modified_base 5: mod_base = OTHER; note = 2'-O-methyluridine-3'-phosphate
  modified_base 6: mod_base = OTHER; note = 2'-fluoroadenosine-3'-phosphate
  modified_base 7: mod_base = OTHER; note = 2'-O-methylguanosine-3'-phosphate
  modified_base 8: mod_base = OTHER; note = 2'-fluoroadenosine-3'-phosphate
  modified_base 9: mod_base = OTHER; note = 2'-fluorouridine-3'-phosphate
  modified_base 10: mod_base = OTHER; note = 2'-O-methylguanosine-3'-phosphate
  modified_base 11: mod_base = OTHER; note = 2'-O-methyladenosine-3'-phosphate
  modified_base 12: mod_base = OTHER; note = 2'-O-methylguanosine-3'-phosphate
  modified_base 13: mod_base = OTHER; note = 2'-O-methylcytidine-3'-phosphate
  modified_base 14: mod_base = OTHER; note = 2'-fluoroadenosine-3'-phosphate
  modified_base 15: mod_base = OTHER; note = 2'-O-methylguanosine-3'-phosphate
  modified_base 16: mod_base = OTHER; note = 2'-fluoroadenosine-3'-phosphate
  modified_base 17: mod_base = OTHER; note = 2'-O-methyluridine-3'-phosphate
  modified_base 18: mod_base = OTHER; note = 2'-O-methylcytidine-3'-phosphate
  modified_base 19: mod_base = OTHER; note = 2'-O-methyluridine-3'-phosphate
  modified_base 20: mod_base = OTHER; note = 2'-O-methylcytidine-3'-phosphate
  modified_base 21: mod_base = OTHER; note = 2'-O-methyluridine-3'-phosphorothioate
  modified_base 22: mod_base = OTHER; note = 2'-O-methyluridine-3'-phosphorothioate
  modified_base 23: mod_base = OTHER; note = 2'-O-methyladenosine-3'-phosphate
tgcttagatgagcagatctctta

SEQ ID NO: 1230 - DNA, 23 bp, synthetic construct
  source 1..23: mol_type = other DNA
  modified_base 1: mod_base = OTHER; note = Vinyl-phosphonate 2'-O-methyluridine-3'-phosphorothioate
  modified_base 2: mod_base = OTHER; note = 2'-deoxyguanosine-3'-phosphorothioate
  modified_base 3: mod_base = OTHER; note = 2'-O-methylcytidine-3'-phosphate
  modified_base 4: mod_base = OTHER; note = 2'-O-methyluridine-3'-phosphate
  modified_base 6: mod_base = OTHER; note = 2'-O-methyladenosine-3'-phosphate
  modified_base 8: mod_base = OTHER; note = 2'-O-methyladenosine-3'-phosphate
  modified_base 9: mod_base = OTHER; note = 2'-O-methyluridine-3'-phosphate
  modified_base 10: mod_base = OTHER; note = 2'-O-methylguanosine-3'-phosphate
  modified_base 11: mod_base = OTHER; note = 2'-O-methyladenosine-3'-phosphate
  modified_base 13: mod_base = OTHER; note = 2'-O-methylcytidine-3'-phosphate
  modified_base 14: mod_base = OTHER; note = 2'-fluoroadenosine-3'-phosphate
  modified_base 15: mod_base = OTHER; note = 2'-O-methylguanosine-3'-phosphate
  modified_base 16: mod_base = OTHER; note = 2'-O-methyladenosine-3'-phosphate
  modified_base 17: mod_base = OTHER; note = 2'-O-methyluridine-3'-phosphate
  modified_base 18: mod_base = OTHER; note = 2'-O-methylcytidine-3'-phosphate
  modified_base 19: mod_base = OTHER; note = 2'-O-methyluridine-3'-phosphate
  modified_base 20: mod_base = OTHER; note = 2'-O-methylcytidine-3'-phosphate
  modified_base 21: mod_base = OTHER; note = 2'-O-methyluridine-3'-phosphorothioate
  modified_base 22: mod_base = OTHER; note = 2'-O-methyluridine-3'-phosphorothioate
  modified_base 23: mod_base = OTHER; note = 2'-O-methyladenosine-3'-phosphate
  misc_feature 1: note = RNA
  misc_feature 2: note = DNA
  misc_feature 3..4: note = RNA
  misc_feature 5: note = DNA
  misc_feature 6: note = RNA
  misc_feature 7: note = DNA
  misc_feature 8..11: note = RNA
  misc_feature 12: note = DNA
  misc_feature 13..23: note = RNA
tgcttagatgagcagatctctta

SEQ ID NO: 1231 - DNA, 23 bp, synthetic construct
  source 1..23: mol_type = other DNA
  modified_base 1: mod_base = OTHER; note = Vinyl-phosphonate 2'-O-methyluridine-3'-phosphorothioate
  modified_base 2: mod_base = OTHER; note = 2'-fluoroguanosine-3'-phosphorothioate
  modified_base 3: mod_base = OTHER; note = 2'-O-methylguanosine-3'-phosphate
  modified_base 4: mod_base = OTHER; note = 2'-O-methylcytidine-3'-phosphate
  modified_base 6: mod_base = OTHER; note = 2'-O-methyluridine-3'-phosphate
  modified_base 7: mod_base = OTHER; note = Adenosine-glycol nucleic acid (GNA) S-Isomer
  modified_base 8: mod_base = OTHER; note = 2'-O-methylguanosine-3'-phosphate
  modified_base 9: mod_base = OTHER; note = 2'-O-methyladenosine-3'-phosphate
  modified_base 10: mod_base = OTHER; note = 2'-O-methyluridine-3'-phosphate
  modified_base 11: mod_base = OTHER; note = 2'-O-methylguanosine-3'-phosphate
  modified_base 12: mod_base = OTHER; note = 2'-O-methyladenosine-3'-phosphate
  modified_base 13: mod_base = OTHER; note = 2'-O-methylguanosine-3'-phosphate
  modified_base 14: mod_base = OTHER; note = 2'-fluorocytidine-3'-phosphate
  modified_base 15: mod_base = OTHER; note = 2'-O-methyladenosine-3'-phosphate
  modified_base 16: mod_base = OTHER; note = 2'-fluoroguanosine-3'-phosphate
  modified_base 17: mod_base = OTHER; note = 2'-O-methyladenosine-3'-phosphate
  modified_base 18: mod_base = OTHER; note = 2'-O-methyluridine-3'-phosphate
  modified_base 19: mod_base = OTHER; note = 2'-O-methylcytidine-3'-phosphate
  modified_base 20: mod_base = OTHER; note = 2'-O-methyluridine-3'-phosphate
  modified_base 21: mod_base = OTHER; note = 2'-O-methylcytidine-3'- phosphorothioate
  modified_base 22: mod_base = OTHER; note = 2'-O-methyluridine-3'-phosphorothioate
  modified_base 23: mod_base = OTHER; note = 2'-O-methyluridine-3'-phosphate
  misc_feature 1..4: note = RNA
  misc_feature 5: note = DNA
  misc_feature 6..23: note = RNA
tggcttagatgagcagatctctt

SEQ ID NO: 1232 - RNA, 23 nt, synthetic construct
  source 1..23: mol_type = other RNA
  modified_base 1: mod_base = OTHER; note = Vinyl-phosphonate 2'-O-methyluridine-3'-phosphorothioate
  modified_base 2: mod_base = OTHER; note = 2'-fluoroguanosine-3'-phosphorothioate
  modified_base 3: mod_base = OTHER; note = 2'-O-methylguanosine-3'-phosphate
  modified_base 4: mod_base = OTHER; note = 2'-O-methylcytidine-3'-phosphate
  modified_base 5: mod_base = OTHER; note = 2'-O-methyluridine-3'-phosphate
  modified_base 6: mod_base = OTHER; note = 2'-fluorouridine-3'-phosphate
  modified_base 7: mod_base = OTHER; note = 2'-O-methyladenosine-3'-phosphate
  modified_base 8: mod_base = OTHER; note = 2'-fluoroguanosine-3'-phosphate
  modified_base 9: mod_base = OTHER; note = 2'-fluoroadenosine-3'-phosphate
  modified_base 10: mod_base = OTHER; note = 2'-O-methyluridine-3'-phosphate
  modified_base 11: mod_base = OTHER; note = 2'-O-methylguanosine-3'-phosphate
  modified_base 12: mod_base = OTHER; note = 2'-O-methyladenosine-3'-phosphate
  modified_base 13: mod_base = OTHER; note = 2'-O-methylguanosine-3'-phosphate
  modified_base 14: mod_base = OTHER; note = 2'-fluorocytidine-3'-phosphate
  modified_base 15: mod_base = OTHER; note = 2'-O-methyladenosine-3'-phosphate
  modified_base 16: mod_base = OTHER; note = 2'-fluoroguanosine-3'-phosphate
  modified_base 17: mod_base = OTHER; note = 2'-O-methyladenosine-3'-phosphate
  modified_base 18: mod_base = OTHER; note = 2'-O-methyluridine-3'-phosphate
  modified_base 19: mod_base = OTHER; note = 2'-O-methylcytidine-3'-phosphate
  modified_base 20: mod_base = OTHER; note = 2'-O-methyluridine-3'-phosphate
  modified_base 21: mod_base = OTHER; note = 2'-O-methylcytidine-3'- phosphorothioate
  modified_base 22: mod_base = OTHER; note = 2'-O-methyluridine-3'-phosphorothioate
  modified_base 23: mod_base = OTHER; note = 2'-O-methyluridine-3'-phosphate
tggcttagatgagcagatctctt

SEQ ID NO: 1233 - DNA, 23 bp, synthetic construct
  source 1..23: mol_type = other DNA
  modified_base 1: mod_base = OTHER; note = Vinyl-phosphonate 2'-O-methyluridine-3'-phosphorothioate
  modified_base 2: mod_base = OTHER; note = 2'-fluoroadenosine-3'-phosphorothioate
  modified_base 3: mod_base = OTHER; note = 2'-O-methylguanosine-3'-phosphate
  modified_base 4: mod_base = OTHER; note = 2'-O-methylguanosine-3'-phosphate
  modified_base 6: mod_base = OTHER; note = 2'-O-methyluridine-3'-phosphate
  modified_base 7: mod_base = OTHER; note = Thymidine-glycol nucleic acid (GNA) S-Isomer
  modified_base 8: mod_base = OTHER; note = 2'-O-methyladenosine-3'-phosphate
  modified_base 9: mod_base = OTHER; note = 2'-O-methylguanosine-3'-phosphate
  modified_base 10: mod_base = OTHER; note = 2'-O-methyladenosine-3'-phosphate
  modified_base 11: mod_base = OTHER; note = 2'-O-methyluridine-3'-phosphate
  modified_base 12: mod_base = OTHER; note = 2'-O-methylguanosine-3'-phosphate
  modified_base 13: mod_base = OTHER; note = 2'-O-methyladenosine-3'-phosphate
  modified_base 14: mod_base = OTHER; note = 2'-fluoroguanosine-3'-phosphate
  modified_base 15: mod_base = OTHER; note = 2'-O-methylcytidine-3'-phosphate
  modified_base 16: mod_base = OTHER; note = 2'-fluoroadenosine-3'-phosphate
  modified_base 17: mod_base = OTHER; note = 2'-O-methylguanosine-3'-phosphate
  modified_base 18: mod_base = OTHER; note = 2'-O-methyladenosine-3'-phosphate
  modified_base 19: mod_base = OTHER; note = 2'-O-methyluridine-3'-phosphate
  modified_base 20: mod_base = OTHER; note = 2'-O-methylcytidine-3'-phosphate
  modified_base 21: mod_base = OTHER; note = 2'-O-methyluridine-3'-phosphorothioate
  modified_base 22: mod_base = OTHER; note = 2'-O-methylcytidine-3'- phosphorothioate
  modified_base 23: mod_base = OTHER; note = 2'-O-methyluridine-3'-phosphate
  misc_feature 1..4: note = RNA
  misc_feature 5: note = DNA
  misc_feature 6: note = RNA
  misc_feature 7: note = DNA
  misc_feature 8..23: note = RNA
taggcttagatgagcagatctct

SEQ ID NO: 1234 - DNA, 23 bp, synthetic construct
  source 1..23: mol_type = other DNA
  modified_base 1: mod_base = OTHER; note = Vinyl-phosphonate 2'-O-methyluridine-3'-phosphorothioate
  modified_base 2: mod_base = OTHER; note = 2'-fluorouridine -3'-phosphorothioate
  modified_base 3: mod_base = OTHER; note = 2'-O-methyladenosine-3'-phosphate
  modified_base 4: mod_base = OTHER; note = 2'-O-methylguanosine-3'-phosphate
  modified_base 6: mod_base = OTHER; note = 2'-O-methylcytidine-3'-phosphate
  modified_base 7: mod_base = OTHER; note = Thymidine-glycol nucleic acid (GNA) S-Isomer
  modified_base 8: mod_base = OTHER; note = 2'-O-methyluridine-3'-phosphate
  modified_base 9: mod_base = OTHER; note = 2'-O-methyladenosine-3'-phosphate
  modified_base 10: mod_base = OTHER; note = 2'-O-methylguanosine-3'-phosphate
  modified_base 11: mod_base = OTHER; note = 2'-O-methyladenosine-3'-phosphate
  modified_base 12: mod_base = OTHER; note = 2'-O-methyluridine-3'-phosphate
  modified_base 13: mod_base = OTHER; note = 2'-O-methylguanosine-3'-phosphate
  modified_base 14: mod_base = OTHER; note = 2'-fluoroadenosine-3'-phosphate
  modified_base 15: mod_base = OTHER; note = 2'-O-methylguanosine-3'-phosphate
  modified_base 16: mod_base = OTHER; note = 2'-fluorocytidine-3'-phosphate
  modified_base 17: mod_base = OTHER; note = 2'-O-methyladenosine-3'-phosphate
  modified_base 18: mod_base = OTHER; note = 2'-O-methylguanosine-3'-phosphate
  modified_base 19: mod_base = OTHER; note = 2'-O-methyladenosine-3'-phosphate
  modified_base 20: mod_base = OTHER; note = 2'-O-methyluridine-3'-phosphate
  modified_base 21: mod_base = OTHER; note = 2'-O-methylcytidine-3'- phosphorothioate
  modified_base 22: mod_base = OTHER; note = 2'-O-methyluridine-3'-phosphorothioate
  modified_base 23: mod_base = OTHER; note = 2'-O-methylcytidine-3'-phosphate
  misc_feature 1..4: note = RNA
  misc_feature 5: note = DNA
  misc_feature 6: note = RNA
  misc_feature 7: note = DNA
  misc_feature 8..23: note = RNA
ttaggcttagatgagcagatctc

SEQ ID NO: 1235 - RNA, 23 nt, synthetic construct
  source 1..23: mol_type = other RNA
  modified_base 1: mod_base = OTHER; note = Vinyl-phosphonate 2'-O-methyluridine-3'-phosphorothioate
  modified_base 2: mod_base = OTHER; note = 2'-fluoroadenosine-3'-phosphorothioate
  modified_base 3: mod_base = OTHER; note = 2'-O-methylcytidine-3'-phosphate
  modified_base 4: mod_base = OTHER; note = 2'-O-methyluridine-3'-phosphate
  modified_base 5: mod_base = OTHER; note = 2'-O-methyluridine-3'-phosphate
  modified_base 6: mod_base = OTHER; note = 2'-fluoroadenosine-3'-phosphate
  modified_base 7: mod_base = OTHER; note = 2'-O-methylguanosine-3'-phosphate
  modified_base 8: mod_base = OTHER; note = 2'-fluoroguanosine-3'-phosphate
  modified_base 9: mod_base = OTHER; note = 2'-fluorocytidine-3'-phosphate
  modified_base 10: mod_base = OTHER; note = 2'-O-methyluridine-3'-phosphate
  modified_base 11: mod_base = OTHER; note = 2'-O-methyluridine-3'-phosphate
  modified_base 12: mod_base = OTHER; note = 2'-O-methyladenosine-3'-phosphate
  modified_base 13: mod_base = OTHER; note = 2'-O-methylguanosine-3'-phosphate
  modified_base 14: mod_base = OTHER; note = 2'-fluoroadenosine-3'-phosphate
  modified_base 15: mod_base = OTHER; note = 2'-O-methyluridine-3'-phosphate
  modified_base 16: mod_base = OTHER; note = 2'-fluoroguanosine-3'-phosphate
  modified_base 17: mod_base = OTHER; note = 2'-O-methyladenosine-3'-phosphate
  modified_base 18: mod_base = OTHER; note = 2'-O-methylguanosine-3'-phosphate
  modified_base 19: mod_base = OTHER; note = 2'-O-methylcytidine-3'-phosphate
  modified_base 20: mod_base = OTHER; note = 2'-O-methyladenosine-3'-phosphate
  modified_base 21: mod_base = OTHER; note = 2'-O-methylguanosine-3'- phosphorothioate
  modified_base 22: mod_base = OTHER; note = 2'-O-methyladenosine-3'- phosphorothioate
  modified_base 23: mod_base = OTHER; note = 2'-O-methyluridine-3'-phosphate
tacttaggcttagatgagcagat

SEQ ID NO: 1236 - DNA, 23 bp, synthetic construct
  source 1..23: mol_type = other DNA
  modified_base 1: mod_base = OTHER; note = Vinyl-phosphonate 2'-O-methyluridine-3'-phosphorothioate
  modified_base 2: mod_base = OTHER; note = 2'-deoxyadenosine-3'-phosphorothioate
  modified_base 3: mod_base = OTHER; note = 2'-O-methylcytidine-3'-phosphate
  modified_base 4: mod_base = OTHER; note = 2'-O-methyluridine-3'-phosphate
  modified_base 6: mod_base = OTHER; note = 2'-O-methyladenosine-3'-phosphate
  modified_base 8: mod_base = OTHER; note = 2'-O-methylguanosine-3'-phosphate
  modified_base 9: mod_base = OTHER; note = 2'-O-methylcytidine-3'-phosphate
  modified_base 10: mod_base = OTHER; note = 2'-O-methyluridine-3'-phosphate
  modified_base 11: mod_base = OTHER; note = 2'-O-methyluridine-3'-phosphate
  modified_base 13: mod_base = OTHER; note = 2'-O-methylguanosine-3'-phosphate
  modified_base 14: mod_base = OTHER; note = 2'-fluoroadenosine-3'-phosphate
  modified_base 15: mod_base = OTHER; note = 2'-O-methyluridine-3'-phosphate
  modified_base 16: mod_base = OTHER; note = 2'-O-methylguanosine-3'-phosphate
  modified_base 17: mod_base = OTHER; note = 2'-O-methyladenosine-3'-phosphate
  modified_base 18: mod_base = OTHER; note = 2'-O-methylguanosine-3'-phosphate
  modified_base 19: mod_base = OTHER; note = 2'-O-methylcytidine-3'-phosphate
  modified_base 20: mod_base = OTHER; note = 2'-O-methyladenosine-3'-phosphate
  modified_base 21: mod_base = OTHER; note = 2'-O-methylguanosine-3'- phosphorothioate
  modified_base 22: mod_base = OTHER; note = 2'-O-methyladenosine-3'- phosphorothioate
  modified_base 23: mod_base = OTHER; note = 2'-O-methyluridine-3'-phosphate
  misc_feature 1: note = RNA
  misc_feature 2: note = DNA
  misc_feature 3..4: note = RNA
  misc_feature 5: note = DNA
  misc_feature 6: note = RNA
  misc_feature 7: note = DNA
  misc_feature 8..11: note = RNA
  misc_feature 12: note = DNA
  misc_feature 13..23: note = RNA
tacttaggcttagatgagcagat

SEQ ID NO: 1237 - DNA, 23 bp, synthetic construct
  source 1..23: mol_type = other DNA
  modified_base 1: mod_base = OTHER; note = Vinyl-phosphonate 2'-O-methyluridine-3'-phosphorothioate
  modified_base 2: mod_base = OTHER; note = 2'-fluoroadenosine-3'-phosphorothioate
  modified_base 3: mod_base = OTHER; note = 2'-O-methyladenosine-3'-phosphate
  modified_base 4: mod_base = OTHER; note = 2'-O-methylcytidine-3'-phosphate
  modified_base 6: mod_base = OTHER; note = 2'-O-methyluridine-3'-phosphate
  modified_base 7: mod_base = OTHER; note = Adenosine-glycol nucleic acid (GNA) S-Isomer
  modified_base 8: mod_base = OTHER; note = 2'-O-methylguanosine-3'-phosphate
  modified_base 9: mod_base = OTHER; note = 2'-O-methylguanosine-3'-phosphate
  modified_base 10: mod_base = OTHER; note = 2'-O-methylcytidine-3'-phosphate
  modified_base 11: mod_base = OTHER; note = 2'-O-methyluridine-3'-phosphate
  modified_base 12: mod_base = OTHER; note = 2'-O-methyluridine-3'-phosphate
  modified_base 13: mod_base = OTHER; note = 2'-O-methyladenosine-3'-phosphate
  modified_base 14: mod_base = OTHER; note = 2'-fluoroguanosine-3'-phosphate
  modified_base 15: mod_base = OTHER; note = 2'-O-methyladenosine-3'-phosphate
  modified_base 16: mod_base = OTHER; note = 2'-fluorouridine-3'-phosphate
  modified_base 17: mod_base = OTHER; note = 2'-O-methylguanosine-3'-phosphate
  modified_base 18: mod_base = OTHER; note = 2'-O-methyladenosine-3'-phosphate
  modified_base 19: mod_base = OTHER; note = 2'-O-methylguanosine-3'-phosphate
  modified_base 20: mod_base = OTHER; note = 2'-O-methylcytidine-3'-phosphate
  modified_base 21: mod_base = OTHER; note = 2'-O-methyladenosine-3'- phosphorothioate
  modified_base 22: mod_base = OTHER; note = 2'-O-methylguanosine-3'- phosphorothioate
  modified_base 23: mod_base = OTHER; note = 2'-O-methyladenosine-3'-phosphate
  misc_feature 1..4: note = RNA
  misc_feature 5: note = DNA
  misc_feature 6..23: note = RNA
taacttaggcttagatgagcaga

SEQ ID NO: 1238 - RNA, 23 nt, synthetic construct
  source 1..23: mol_type = other RNA
  modified_base 1: mod_base = OTHER; note = Vinyl-phosphonate 2'-O-methyluridine-3'-phosphorothioate
  modified_base 2: mod_base = OTHER; note = 2'-fluoroadenosine-3'-phosphorothioate
  modified_base 3: mod_base = OTHER; note = 2'-O-methyladenosine-3'-phosphate
  modified_base 4: mod_base = OTHER; note = 2'-O-methylcytidine-3'-phosphate
  modified_base 5: mod_base = OTHER; note = 2'-O-methyluridine-3'-phosphate
  modified_base 6: mod_base = OTHER; note = 2'-fluorouridine-3'-phosphate
  modified_base 7: mod_base = OTHER; note = 2'-O-methyladenosine-3'-phosphate
  modified_base 8: mod_base = OTHER; note = 2'-fluoroguanosine-3'-phosphate
  modified_base 9: mod_base = OTHER; note = 2'-fluoroguanosine-3'-phosphate
  modified_base 10: mod_base = OTHER; note = 2'-O-methylcytidine-3'-phosphate
  modified_base 11: mod_base = OTHER; note = 2'-O-methyluridine-3'-phosphate
  modified_base 12: mod_base = OTHER; note = 2'-O-methyluridine-3'-phosphate
  modified_base 13: mod_base = OTHER; note = 2'-O-methyladenosine-3'-phosphate
  modified_base 14: mod_base = OTHER; note = 2'-fluoroguanosine-3'-phosphate
  modified_base 15: mod_base = OTHER; note = 2'-O-methyladenosine-3'-phosphate
  modified_base 16: mod_base = OTHER; note = 2'-fluorouridine-3'-phosphate
  modified_base 17: mod_base = OTHER; note = 2'-O-methylguanosine-3'-phosphate
  modified_base 18: mod_base = OTHER; note = 2'-O-methyladenosine-3'-phosphate
  modified_base 19: mod_base = OTHER; note = 2'-O-methylguanosine-3'-phosphate
  modified_base 20: mod_base = OTHER; note = 2'-O-methylcytidine-3'-phosphate
  modified_base 21: mod_base = OTHER; note = 2'-O-methyladenosine-3'- phosphorothioate
  modified_base 22: mod_base = OTHER; note = 2'-O-methylguanosine-3'- phosphorothioate
  modified_base 23: mod_base = OTHER; note = 2'-O-methyladenosine-3'-phosphate
taacttaggcttagatgagcaga

SEQ ID NO: 1239 - DNA, 23 bp, synthetic construct
  source 1..23: mol_type = other DNA
  modified_base 1: mod_base = OTHER; note = Vinyl-phosphonate 2'-O-methyluridine-3'-phosphorothioate
  modified_base 2: mod_base = OTHER; note = 2'-deoxyadenosine-3'-phosphorothioate
  modified_base 3: mod_base = OTHER; note = 2'-O-methyladenosine-3'-phosphate
  modified_base 4: mod_base = OTHER; note = 2'-O-methylcytidine-3'-phosphate
  modified_base 6: mod_base = OTHER; note = 2'-O-methyluridine-3'-phosphate
  modified_base 8: mod_base = OTHER; note = 2'-O-methylguanosine-3'-phosphate
  modified_base 9: mod_base = OTHER; note = 2'-O-methylguanosine-3'-phosphate
  modified_base 10: mod_base = OTHER; note = 2'-O-methylcytidine-3'-phosphate
  modified_base 11: mod_base = OTHER; note = 2'-O-methyluridine-3'-phosphate
  modified_base 13: mod_base = OTHER; note = 2'-O-methyladenosine-3'-phosphate
  modified_base 14: mod_base = OTHER; note = 2'-fluoroguanosine-3'-phosphate
  modified_base 15: mod_base = OTHER; note = 2'-O-methyladenosine-3'-phosphate
  modified_base 16: mod_base = OTHER; note = 2'-O-methyluridine-3'-phosphate
  modified_base 17: mod_base = OTHER; note = 2'-O-methylguanosine-3'-phosphate
  modified_base 18: mod_base = OTHER; note = 2'-O-methyladenosine-3'-phosphate
  modified_base 19: mod_base = OTHER; note = 2'-O-methylguanosine-3'-phosphate
  modified_base 20: mod_base = OTHER; note = 2'-O-methylcytidine-3'-phosphate
  modified_base 21: mod_base = OTHER; note = 2'-O-methyladenosine-3'- phosphorothioate
  modified_base 22: mod_base = OTHER; note = 2'-O-methylguanosine-3'- phosphorothioate
  modified_base 23: mod_base = OTHER; note = 2'-O-methyladenosine-3'-phosphate
  misc_feature 1: note = RNA
  misc_feature 2: note = DNA
  misc_feature 3..4: note = RNA
  misc_feature 5: note = DNA
  misc_feature 6: note = RNA
  misc_feature 7: note = DNA
  misc_feature 8..11: note = RNA
  misc_feature 12: note = DNA
  misc_feature 13..23: note = RNA
taacttaggcttagatgagcaga

SEQ ID NO: 1240 - RNA, 23 nt, synthetic construct
  source 1..23: mol_type = other RNA
  modified_base 1: mod_base = OTHER; note = Vinyl-phosphonate 2'-O-methyluridine-3'-phosphorothioate
  modified_base 2: mod_base = OTHER; note = 2'-fluorocytidine-3'-phosphorothioate
  modified_base 3: mod_base = OTHER; note = 2'-O-methyladenosine-3'-phosphate
  modified_base 4: mod_base = OTHER; note = 2'-O-methyladenosine-3'-phosphate
  modified_base 5: mod_base = OTHER; note = 2'-O-methylcytidine-3'-phosphate
  modified_base 6: mod_base = OTHER; note = 2'-fluorouridine-3'-phosphate
  modified_base 7: mod_base = OTHER; note = 2'-O-methyluridine-3'-phosphate
  modified_base 8: mod_base = OTHER; note = 2'-fluoroadenosine-3'-phosphate
  modified_base 9: mod_base = OTHER; note = 2'-fluoroguanosine-3'-phosphate
  modified_base 10: mod_base = OTHER; note = 2'-O-methylguanosine-3'-phosphate
  modified_base 11: mod_base = OTHER; note = 2'-O-methylcytidine-3'-phosphate
  modified_base 12: mod_base = OTHER; note = 2'-O-methyluridine-3'-phosphate
  modified_base 13: mod_base = OTHER; note = 2'-O-methyluridine-3'-phosphate
  modified_base 14: mod_base = OTHER; note = 2'-fluoroadenosine-3'-phosphate
  modified_base 15: mod_base = OTHER; note = 2'-O-methylguanosine-3'-phosphate
  modified_base 16: mod_base = OTHER; note = 2'-fluoroadenosine-3'-phosphate
  modified_base 17: mod_base = OTHER; note = 2'-O-methyluridine-3'-phosphate
  modified_base 18: mod_base = OTHER; note = 2'-O-methylguanosine-3'-phosphate
  modified_base 19: mod_base = OTHER; note = 2'-O-methyladenosine-3'-phosphate
  modified_base 20: mod_base = OTHER; note = 2'-O-methylguanosine-3'-phosphate
  modified_base 21: mod_base = OTHER; note = 2'-O-methylcytidine-3'- phosphorothioate
  modified_base 22: mod_base = OTHER; note = 2'-O-methyladenosine-3'- phosphorothioate
  modified_base 23: mod_base = OTHER; note = 2'-O-methylguanosine-3'-phosphate
tcaacttaggcttagatgagcag

SEQ ID NO: 1241 - DNA, 23 bp, synthetic construct
  source 1..23: mol_type = other DNA
  modified_base 1: mod_base = OTHER; note = Vinyl-phosphonate 2'-O-methyluridine-3'-phosphorothioate
  modified_base 2: mod_base = OTHER; note = 2'-deoxycytidine-3'-phosphorothioate
  modified_base 3: mod_base = OTHER; note = 2'-O-methyladenosine-3'-phosphate
  modified_base 4: mod_base = OTHER; note = 2'-O-methyladenosine-3'-phosphate
  modified_base 6: mod_base = OTHER; note = 2'-O-methyluridine-3'-phosphate
  modified_base 8: mod_base = OTHER; note = 2'-O-methyladenosine-3'-phosphate
  modified_base 9: mod_base = OTHER; note = 2'-O-methylguanosine-3'-phosphate
  modified_base 10: mod_base = OTHER; note = 2'-O-methylguanosine-3'-phosphate
  modified_base 11: mod_base = OTHER; note = 2'-O-methylcytidine-3'-phosphate
  modified_base 13: mod_base = OTHER; note = 2'-O-methyluridine-3'-phosphate
  modified_base 14: mod_base = OTHER; note = 2'-fluoroadenosine-3'-phosphate
  modified_base 15: mod_base = OTHER; note = 2'-O-methylguanosine-3'-phosphate
  modified_base 16: mod_base = OTHER; note = 2'-O-methyladenosine-3'-phosphate
  modified_base 17: mod_base = OTHER; note = 2'-O-methyluridine-3'-phosphate
  modified_base 18: mod_base = OTHER; note = 2'-O-methylguanosine-3'-phosphate
  modified_base 19: mod_base = OTHER; note = 2'-O-methyladenosine-3'-phosphate
  modified_base 20: mod_base = OTHER; note = 2'-O-methylguanosine-3'-phosphate
  modified_base 21: mod_base = OTHER; note = 2'-O-methylcytidine-3'- phosphorothioate
  modified_base 22: mod_base = OTHER; note = 2'-O-methyladenosine-3'- phosphorothioate
  modified_base 23: mod_base = OTHER; note = 2'-O-methylguanosine-3'-phosphate
  misc_feature 1: note = RNA
  misc_feature 2: note = DNA
  misc_feature 3..4: note = RNA
  misc_feature 5: note = DNA
  misc_feature 6: note = RNA
  misc_feature 7: note = DNA
  misc_feature 8..11: note = RNA
  misc_feature 12: note = DNA
  misc_feature 13..23: note = RNA
tcaacttaggcttagatgagcag

SEQ ID NO: 1242 - RNA, 23 nt, synthetic construct
  source 1..23: mol_type = other RNA
  modified_base 1: mod_base = OTHER; note = Vinyl-phosphonate 2'-O-methyluridine-3'-phosphorothioate
  modified_base 2: mod_base = OTHER; note = 2'-fluorocytidine-3'-phosphorothioate
  modified_base 3: mod_base = OTHER; note = 2'-O-methylcytidine-3'-phosphate
  modified_base 4: mod_base = OTHER; note = 2'-O-methyladenosine-3'-phosphate
  modified_base 5: mod_base = OTHER; note = 2'-O-methyladenosine-3'-phosphate
  modified_base 6: mod_base = OTHER; note = 2'-fluorocytidine-3'-phosphate
  modified_base 7: mod_base = OTHER; note = 2'-O-methyluridine-3'-phosphate
  modified_base 8: mod_base = OTHER; note = 2'-fluorouridine-3'-phosphate
  modified_base 9: mod_base = OTHER; note = 2'-fluoroadenosine-3'-phosphate
  modified_base 10: mod_base = OTHER; note = 2'-O-methylguanosine-3'-phosphate
  modified_base 11: mod_base = OTHER; note = 2'-O-methylguanosine-3'-phosphate
  modified_base 12: mod_base = OTHER; note = 2'-O-methylcytidine-3'-phosphate
  modified_base 13: mod_base = OTHER; note = 2'-O-methyluridine-3'-phosphate
  modified_base 14: mod_base = OTHER; note = 2'-fluorouridine-3'-phosphate
  modified_base 15: mod_base = OTHER; note = 2'-O-methyladenosine-3'-phosphate
  modified_base 16: mod_base = OTHER; note = 2'-fluoroguanosine-3'-phosphate
  modified_base 17: mod_base = OTHER; note = 2'-O-methyladenosine-3'-phosphate
  modified_base 18: mod_base = OTHER; note = 2'-O-methyluridine-3'-phosphate
  modified_base 19: mod_base = OTHER; note = 2'-O-methylguanosine-3'-phosphate
  modified_base 20: mod_base = OTHER; note = 2'-O-methyladenosine-3'-phosphate
  modified_base 21: mod_base = OTHER; note = 2'-O-methylguanosine-3'- phosphorothioate
  modified_base 22: mod_base = OTHER; note = 2'-O-methylcytidine-3'- phosphorothioate
  modified_base 23: mod_base = OTHER; note = 2'-O-methyladenosine-3'-phosphate
tccaacttaggcttagatgagca

SEQ ID NO: 1243 - DNA, 23 bp, synthetic construct
  source 1..23: mol_type = other DNA
  modified_base 1: mod_base = OTHER; note = Vinyl-phosphonate 2'-O-methyluridine-3'-phosphorothioate
  modified_base 2: mod_base = OTHER; note = 2'-deoxycytidine-3'-phosphorothioate
  modified_base 3: mod_base = OTHER; note = 2'-O-methylcytidine-3'-phosphate
  modified_base 4: mod_base = OTHER; note = 2'-O-methyladenosine-3'-phosphate
  modified_base 6: mod_base = OTHER; note = 2'-O-methylcytidine-3'-phosphate
  modified_base 8: mod_base = OTHER; note = 2'-O-methyluridine-3'-phosphate
  modified_base 9: mod_base = OTHER; note = 2'-O-methyladenosine-3'-phosphate
  modified_base 10: mod_base = OTHER; note = 2'-O-methylguanosine-3'-phosphate
  modified_base 11: mod_base = OTHER; note = 2'-O-methylguanosine-3'-phosphate
  modified_base 13: mod_base = OTHER; note = 2'-O-methyluridine-3'-phosphate
  modified_base 14: mod_base = OTHER; note = 2'-fluorouridine-3'-phosphate
  modified_base 15: mod_base = OTHER; note = 2'-O-methyladenosine-3'-phosphate
  modified_base 16: mod_base = OTHER; note = 2'-O-methylguanosine-3'-phosphate
  modified_base 17: mod_base = OTHER; note = 2'-O-methyladenosine-3'-phosphate
  modified_base 18: mod_base = OTHER; note = 2'-O-methyluridine-3'-phosphate
  modified_base 19: mod_base = OTHER; note = 2'-O-methylguanosine-3'-phosphate
  modified_base 20: mod_base = OTHER; note = 2'-O-methyladenosine-3'-phosphate
  modified_base 21: mod_base = OTHER; note = 2'-O-methylguanosine-3'- phosphorothioate
  modified_base 22: mod_base = OTHER; note = 2'-O-methylcytidine-3'- phosphorothioate
  modified_base 23: mod_base = OTHER; note = 2'-O-methyladenosine-3'-phosphate
  misc_feature 1: note = RNA
  misc_feature 2: note = DNA
  misc_feature 3..4: note = RNA
  misc_feature 5: note = DNA
  misc_feature 6: note = RNA
  misc_feature 7: note = DNA
  misc_feature 8..11: note = RNA
  misc_feature 12: note = DNA
  misc_feature 13..23: note = RNA
tccaacttaggcttagatgagca

SEQ ID NO: 1244 - RNA, 23 nt, synthetic construct
  source 1..23: mol_type = other RNA
  modified_base 1: mod_base = OTHER; note = Vinyl-phosphonate 2'-O-methyluridine-3'-phosphorothioate
  modified_base 2: mod_base = OTHER; note = 2'-fluoroadenosine-3'-phosphorothioate
  modified_base 3: mod_base = OTHER; note = 2'-O-methylcytidine-3'-phosphate
  modified_base 4: mod_base = OTHER; note = 2'-O-methylcytidine-3'-phosphate
  modified_base 5: mod_base = OTHER; note = 2'-O-methyladenosine-3'-phosphate
  modified_base 6: mod_base = OTHER; note = 2'-fluoroadenosine-3'-phosphate
  modified_base 7: mod_base = OTHER; note = 2'-O-methylcytidine-3'-phosphate
  modified_base 8: mod_base = OTHER; note = 2'-fluorouridine-3'-phosphate
  modified_base 9: mod_base = OTHER; note = 2'-fluorouridine-3'-phosphate
  modified_base 10: mod_base = OTHER; note = 2'-O-methyladenosine-3'-phosphate
  modified_base 11: mod_base = OTHER; note = 2'-O-methylguanosine-3'-phosphate
  modified_base 12: mod_base = OTHER; note = 2'-O-methylguanosine-3'-phosphate
  modified_base 13: mod_base = OTHER; note = 2'-O-methylcytidine-3'-phosphate
  modified_base 14: mod_base = OTHER; note = 2'-fluorouridine-3'-phosphate
  modified_base 15: mod_base = OTHER; note = 2'-O-methyluridine-3'-phosphate
  modified_base 16: mod_base = OTHER; note = 2'-fluoroadenosine-3'-phosphate
  modified_base 17: mod_base = OTHER; note = 2'-O-methylguanosine-3'-phosphate
  modified_base 18: mod_base = OTHER; note = 2'-O-methyladenosine-3'-phosphate
  modified_base 19: mod_base = OTHER; note = 2'-O-methyluridine-3'-phosphate
  modified_base 20: mod_base = OTHER; note = 2'-O-methylguanosine-3'-phosphate
  modified_base 21: mod_base = OTHER; note = 2'-O-methyladenosine-3'- phosphorothioate
  modified_base 22: mod_base = OTHER; note = 2'-O-methylguanosine-3'- phosphorothioate
  modified_base 23: mod_base = OTHER; note = 2'-O-methylcytidine-3'-phosphate
taccaacttaggcttagatgagc

SEQ ID NO: 1245 - DNA, 23 bp, synthetic construct
  source 1..23: mol_type = other DNA
  modified_base 1: mod_base = OTHER; note = Vinyl-phosphonate 2'-O-methyluridine-3'-phosphorothioate
  modified_base 2: mod_base = OTHER; note = 2'-deoxyadenosine-3'-phosphorothioate
  modified_base 3: mod_base = OTHER; note = 2'-O-methylcytidine-3'-phosphate
  modified_base 4: mod_base = OTHER; note = 2'-O-methylcytidine-3'-phosphate
  modified_base 6: mod_base = OTHER; note = 2'-O-methyladenosine-3'-phosphate
  modified_base 8: mod_base = OTHER; note = 2'-O-methyluridine-3'-phosphate
  modified_base 9: mod_base = OTHER; note = 2'-O-methyluridine-3'-phosphate
  modified_base 10: mod_base = OTHER; note = 2'-O-methyladenosine-3'-phosphate
  modified_base 11: mod_base = OTHER; note = 2'-O-methylguanosine-3'-phosphate
  modified_base 13: mod_base = OTHER; note = 2'-O-methylcytidine-3'-phosphate
  modified_base 14: mod_base = OTHER; note = 2'-fluorouridine-3'-phosphate
  modified_base 15: mod_base = OTHER; note = 2'-O-methyluridine-3'-phosphate
  modified_base 16: mod_base = OTHER; note = 2'-O-methyladenosine-3'-phosphate
  modified_base 17: mod_base = OTHER; note = 2'-O-methylguanosine-3'-phosphate
  modified_base 18: mod_base = OTHER; note = 2'-O-methyladenosine-3'-phosphate
  modified_base 19: mod_base = OTHER; note = 2'-O-methyluridine-3'-phosphate
  modified_base 20: mod_base = OTHER; note = 2'-O-methylguanosine-3'-phosphate
  modified_base 21: mod_base = OTHER; note = 2'-O-methyladenosine-3'- phosphorothioate
  modified_base 22: mod_base = OTHER; note = 2'-O-methylguanosine-3'- phosphorothioate
  modified_base 23: mod_base = OTHER; note = 2'-O-methylcytidine-3'-phosphate
  misc_feature 1: note = RNA
  misc_feature 2: note = DNA
  misc_feature 3..4: note = RNA
  misc_feature 5: note = DNA
  misc_feature 6: note = RNA
  misc_feature 7: note = DNA
  misc_feature 8..11: note = RNA
  misc_feature 12: note = DNA
  misc_feature 13..23: note = RNA
taccaacttaggcttagatgagc

SEQ ID NO: 1246 - DNA, 23 bp, synthetic construct
  source 1..23: mol_type = other DNA
  modified_base 1: mod_base = OTHER; note = Vinyl-phosphonate 2'-O-methyluridine-3'-phosphorothioate
  modified_base 2: mod_base = OTHER; note = 2'-fluoroguanosine-3'-phosphorothioate
  modified_base 3: mod_base = OTHER; note = 2'-O-methyladenosine-3'-phosphate
  modified_base 4: mod_base = OTHER; note = 2'-O-methylcytidine-3'-phosphate
  modified_base 6: mod_base = OTHER; note = 2'-O-methyladenosine-3'-phosphate
  modified_base 7: mod_base = OTHER; note = Adenosine-glycol nucleic acid (GNA) S-Isomer
  modified_base 8: mod_base = OTHER; note = 2'-O-methylcytidine-3'-phosphate
  modified_base 9: mod_base = OTHER; note = 2'-O-methyluridine-3'-phosphate
  modified_base 10: mod_base = OTHER; note = 2'-O-methyluridine-3'-phosphate
  modified_base 11: mod_base = OTHER; note = 2'-O-methyladenosine-3'-phosphate
  modified_base 12: mod_base = OTHER; note = 2'-O-methylguanosine-3'-phosphate
  modified_base 13: mod_base = OTHER; note = 2'-O-methylguanosine-3'-phosphate
  modified_base 14: mod_base = OTHER; note = 2'-fluorocytidine-3'-phosphate
  modified_base 15: mod_base = OTHER; note = 2'-O-methyluridine-3'-phosphate
  modified_base 16: mod_base = OTHER; note = 2'-fluorouridine-3'-phosphate
  modified_base 17: mod_base = OTHER; note = 2'-O-methyladenosine-3'-phosphate
  modified_base 18: mod_base = OTHER; note = 2'-O-methylguanosine-3'-phosphate
  modified_base 19: mod_base = OTHER; note = 2'-O-methyladenosine-3'-phosphate
  modified_base 20: mod_base = OTHER; note = 2'-O-methyluridine-3'-phosphate
  modified_base 21: mod_base = OTHER; note = 2'-O-methylguanosine-3'- phosphorothioate
  modified_base 22: mod_base = OTHER; note = 2'-O-methyladenosine-3'- phosphorothioate
  modified_base 23: mod_base = OTHER; note = 2'-O-methylguanosine-3'-phosphate
  misc_feature 1..4: note = RNA
  misc_feature 5: note = DNA
  misc_feature 6..23: note = RNA
tgaccaacttaggcttagatgag

SEQ ID NO: 1247 - RNA, 23 nt, synthetic construct
  source 1..23: mol_type = other RNA
  modified_base 1: mod_base = OTHER; note = Vinyl-phosphonate 2'-O-methyluridine-3'-phosphorothioate
  modified_base 2: mod_base = OTHER; note = 2'-fluoroguanosine-3'-phosphorothioate
  modified_base 3: mod_base = OTHER; note = 2'-O-methyladenosine-3'-phosphate
  modified_base 4: mod_base = OTHER; note = 2'-O-methylcytidine-3'-phosphate
  modified_base 5: mod_base = OTHER; note = 2'-O-methylcytidine-3'-phosphate
  modified_base 6: mod_base = OTHER; note = 2'-fluoroadenosine-3'-phosphate
  modified_base 7: mod_base = OTHER; note = 2'-O-methyladenosine-3'-phosphate
  modified_base 8: mod_base = OTHER; note = 2'-fluorocytidine-3'-phosphate
  modified_base 9: mod_base = OTHER; note = 2'-fluorouridine-3'-phosphate
  modified_base 10: mod_base = OTHER; note = 2'-O-methyluridine-3'-phosphate
  modified_base 11: mod_base = OTHER; note = 2'-O-methyladenosine-3'-phosphate
  modified_base 12: mod_base = OTHER; note = 2'-O-methylguanosine-3'-phosphate
  modified_base 13: mod_base = OTHER; note = 2'-O-methylguanosine-3'-phosphate
  modified_base 14: mod_base = OTHER; note = 2'-fluorocytidine-3'-phosphate
  modified_base 15: mod_base = OTHER; note = 2'-O-methyluridine-3'-phosphate
  modified_base 16: mod_base = OTHER; note = 2'-fluorouridine-3'-phosphate
  modified_base 17: mod_base = OTHER; note = 2'-O-methyladenosine-3'-phosphate
  modified_base 18: mod_base = OTHER; note = 2'-O-methylguanosine-3'-phosphate
  modified_base 19: mod_base = OTHER; note = 2'-O-methyladenosine-3'-phosphate
  modified_base 20: mod_base = OTHER; note = 2'-O-methyluridine-3'-phosphate
  modified_base 21: mod_base = OTHER; note = 2'-O-methylguanosine-3'- phosphorothioate
  modified_base 22: mod_base = OTHER; note = 2'-O-methyladenosine-3'- phosphorothioate
  modified_base 23: mod_base = OTHER; note = 2'-O-methylguanosine-3'-phosphate
tgaccaacttaggcttagatgag

SEQ ID NO: 1248 - DNA, 23 bp, synthetic construct
  source 1..23: mol_type = other DNA
  modified_base 1: mod_base = OTHER; note = Vinyl-phosphonate 2'-O-methyluridine-3'-phosphorothioate
  modified_base 2: mod_base = OTHER; note = 2'-deoxyguanosine-3'-phosphorothioate
  modified_base 3: mod_base = OTHER; note = 2'-O-methyladenosine-3'-phosphate
  modified_base 4: mod_base = OTHER; note = 2'-O-methylcytidine-3'-phosphate
  modified_base 6: mod_base = OTHER; note = 2'-O-methyladenosine-3'-phosphate
  modified_base 8: mod_base = OTHER; note = 2'-O-methylcytidine-3'-phosphate
  modified_base 9: mod_base = OTHER; note = 2'-O-methyluridine-3'-phosphate
  modified_base 10: mod_base = OTHER; note = 2'-O-methyluridine-3'-phosphate
  modified_base 11: mod_base = OTHER; note = 2'-O-methyladenosine-3'-phosphate
  modified_base 13: mod_base = OTHER; note = 2'-O-methylguanosine-3'-phosphate
  modified_base 14: mod_base = OTHER; note = 2'-fluorocytidine-3'-phosphate
  modified_base 15: mod_base = OTHER; note = 2'-O-methyluridine-3'-phosphate
  modified_base 16: mod_base = OTHER; note = 2'-O-methyluridine-3'-phosphate
  modified_base 17: mod_base = OTHER; note = 2'-O-methyladenosine-3'-phosphate
  modified_base 18: mod_base = OTHER; note = 2'-O-methylguanosine-3'-phosphate
  modified_base 19: mod_base = OTHER; note = 2'-O-methyladenosine-3'-phosphate
  modified_base 20: mod_base = OTHER; note = 2'-O-methyluridine-3'-phosphate
  modified_base 21: mod_base = OTHER; note = 2'-O-methylguanosine-3'- phosphorothioate
  modified_base 22: mod_base = OTHER; note = 2'-O-methyladenosine-3'- phosphorothioate
  modified_base 23: mod_base = OTHER; note = 2'-O-methylguanosine-3'-phosphate
  misc_feature 1: note = RNA
  misc_feature 2: note = DNA
  misc_feature 3..4: note = RNA
  misc_feature 5: note = DNA
  misc_feature 6: note = RNA
  misc_feature 7: note = DNA
  misc_feature 8..11: note = RNA
  misc_feature 12: note = DNA
  misc_feature 13..23: note = RNA
tgaccaacttaggcttagatgag

SEQ ID NO: 1249 - RNA, 23 nt, synthetic construct
  source 1..23: mol_type = other RNA
  modified_base 1: mod_base = OTHER; note = Vinyl-phosphonate 2'-O-methyluridine-3'-phosphorothioate
  modified_base 2: mod_base = OTHER; note = 2'-fluoroadenosine-3'-phosphorothioate
  modified_base 3: mod_base = OTHER; note = 2'-O-methylguanosine-3'-phosphate
  modified_base 4: mod_base = OTHER; note = 2'-O-methyladenosine-3'-phosphate
  modified_base 5: mod_base = OTHER; note = 2'-O-methylcytidine-3'-phosphate
  modified_base 6: mod_base = OTHER; note = 2'-fluorocytidine-3'-phosphate
  modified_base 7: mod_base = OTHER; note = 2'-O-methyladenosine-3'-phosphate
  modified_base 8: mod_base = OTHER; note = 2'-fluoroadenosine-3'-phosphate
  modified_base 9: mod_base = OTHER; note = 2'-fluorocytidine-3'-phosphate
  modified_base 10: mod_base = OTHER; note = 2'-O-methyluridine-3'-phosphate
  modified_base 11: mod_base = OTHER; note = 2'-O-methyluridine-3'-phosphate
  modified_base 12: mod_base = OTHER; note = 2'-O-methyladenosine-3'-phosphate
  modified_base 13: mod_base = OTHER; note = 2'-O-methylguanosine-3'-phosphate
  modified_base 14: mod_base = OTHER; note = 2'-fluoroguanosine-3'-phosphate
  modified_base 15: mod_base = OTHER; note = 2'-O-methylcytidine-3'-phosphate
  modified_base 16: mod_base = OTHER; note = 2'-fluorouridine-3'-phosphate
  modified_base 17: mod_base = OTHER; note = 2'-O-methyluridine-3'-phosphate
  modified_base 18: mod_base = OTHER; note = 2'-O-methyladenosine-3'-phosphate
  modified_base 19: mod_base = OTHER; note = 2'-O-methylguanosine-3'-phosphate
  modified_base 20: mod_base = OTHER; note = 2'-O-methyladenosine-3'-phosphate
  modified_base 21: mod_base = OTHER; note = 2'-O-methyluridine-3'-phosphorothioate
  modified_base 22: mod_base = OTHER; note = 2'-O-methylguanosine-3'- phosphorothioate
  modified_base 23: mod_base = OTHER; note = 2'-O-methyladenosine-3'-phosphate
tagaccaacttaggcttagatga

SEQ ID NO: 1250 - DNA, 23 bp, synthetic construct
  source 1..23: mol_type = other DNA
  modified_base 1: mod_base = OTHER; note = Vinyl-phosphonate 2'-O-methyluridine-3'-phosphorothioate
  modified_base 2: mod_base = OTHER; note = 2'-deoxyadenosine-3'-phosphorothioate
  modified_base 3: mod_base = OTHER; note = 2'-O-methylguanosine-3'-phosphate
  modified_base 4: mod_base = OTHER; note = 2'-O-methyladenosine-3'-phosphate
  modified_base 6: mod_base = OTHER; note = 2'-O-methylcytidine-3'-phosphate
  modified_base 8: mod_base = OTHER; note = 2'-O-methyladenosine-3'-phosphate
  modified_base 9: mod_base = OTHER; note = 2'-O-methylcytidine-3'-phosphate
  modified_base 10: mod_base = OTHER; note = 2'-O-methyluridine-3'-phosphate
  modified_base 11: mod_base = OTHER; note = 2'-O-methyluridine-3'-phosphate
  modified_base 13: mod_base = OTHER; note = 2'-O-methylguanosine-3'-phosphate
  modified_base 14: mod_base = OTHER; note = 2'-fluoroguanosine-3'-phosphate
  modified_base 15: mod_base = OTHER; note = 2'-O-methylcytidine-3'-phosphate
  modified_base 16: mod_base = OTHER; note = 2'-O-methyluridine-3'-phosphate
  modified_base 17: mod_base = OTHER; note = 2'-O-methyluridine-3'-phosphate
  modified_base 18: mod_base = OTHER; note = 2'-O-methyladenosine-3'-phosphate
  modified_base 19: mod_base = OTHER; note = 2'-O-methylguanosine-3'-phosphate
  modified_base 20: mod_base = OTHER; note = 2'-O-methyladenosine-3'-phosphate
  modified_base 21: mod_base = OTHER; note = 2'-O-methyluridine-3'-phosphorothioate
  modified_base 22: mod_base = OTHER; note = 2'-O-methylguanosine-3'- phosphorothioate
  modified_base 23: mod_base = OTHER; note = 2'-O-methyladenosine-3'-phosphate
  misc_feature 1: note = RNA
  misc_feature 2: note = DNA
  misc_feature 3..4: note = RNA
  misc_feature 5: note = DNA
  misc_feature 6: note = RNA
  misc_feature 7: note = DNA
  misc_feature 8..11: note = RNA
  misc_feature 12: note = DNA
  misc_feature 13..23: note = RNA
tagaccaacttaggcttagatga

SEQ ID NO: 1251 - RNA, 23 nt, synthetic construct
  source 1..23: mol_type = other RNA
  modified_base 1: mod_base = OTHER; note = Vinyl-phosphonate 2'-O-methyluridine-3'-phosphorothioate
  modified_base 2: mod_base = OTHER; note = 2'-fluorocytidine-3'-phosphorothioate
  modified_base 3: mod_base = OTHER; note = 2'-O-methyladenosine-3'-phosphate
  modified_base 4: mod_base = OTHER; note = 2'-O-methylguanosine-3'-phosphate
  modified_base 5: mod_base = OTHER; note = 2'-O-methyladenosine-3'-phosphate
  modified_base 6: mod_base = OTHER; note = 2'-fluorocytidine-3'-phosphate
  modified_base 7: mod_base = OTHER; note = 2'-O-methylcytidine-3'-phosphate
  modified_base 8: mod_base = OTHER; note = 2'-fluoroadenosine-3'-phosphate
  modified_base 9: mod_base = OTHER; note = 2'-fluoroadenosine-3'-phosphate
  modified_base 10: mod_base = OTHER; note = 2'-O-methylcytidine-3'-phosphate
  modified_base 11: mod_base = OTHER; note = 2'-O-methyluridine-3'-phosphate
  modified_base 12: mod_base = OTHER; note = 2'-O-methyluridine-3'-phosphate
  modified_base 13: mod_base = OTHER; note = 2'-O-methyladenosine-3'-phosphate
  modified_base 14: mod_base = OTHER; note = 2'-fluoroguanosine-3'-phosphate
  modified_base 15: mod_base = OTHER; note = 2'-O-methylguanosine-3'-phosphate
  modified_base 16: mod_base = OTHER; note = 2'-fluorocytidine-3'-phosphate
  modified_base 17: mod_base = OTHER; note = 2'-O-methyluridine-3'-phosphate
  modified_base 18: mod_base = OTHER; note = 2'-O-methyluridine-3'-phosphate
  modified_base 19: mod_base = OTHER; note = 2'-O-methyladenosine-3'-phosphate
  modified_base 20: mod_base = OTHER; note = 2'-O-methylguanosine-3'-phosphate
  modified_base 21: mod_base = OTHER; note = 2'-O-methyladenosine-3'- phosphorothioate
  modified_base 22: mod_base = OTHER; note = 2'-O-methyluridine-3'-phosphorothioate
  modified_base 23: mod_base = OTHER; note = 2'-O-methylguanosine-3'-phosphate
tcagaccaacttaggcttagatg

SEQ ID NO: 1252 - DNA, 23 bp, synthetic construct
  source 1..23: mol_type = other DNA
  modified_base 1: mod_base = OTHER; note = Vinyl-phosphonate 2'-O-methyluridine-3'-phosphorothioate
  modified_base 2: mod_base = OTHER; note = 2'-deoxycytidine-3'-phosphorothioate
  modified_base 3: mod_base = OTHER; note = 2'-O-methyladenosine-3'-phosphate
  modified_base 4: mod_base = OTHER; note = 2'-O-methylguanosine-3'-phosphate
  modified_base 6: mod_base = OTHER; note = 2'-O-methylcytidine-3'-phosphate
  modified_base 8: mod_base = OTHER; note = 2'-O-methyladenosine-3'-phosphate
  modified_base 9: mod_base = OTHER; note = 2'-O-methyladenosine-3'-phosphate
  modified_base 10: mod_base = OTHER; note = 2'-O-methylcytidine-3'-phosphate
  modified_base 11: mod_base = OTHER; note = 2'-O-methyluridine-3'-phosphate
  modified_base 13: mod_base = OTHER; note = 2'-O-methyladenosine-3'-phosphate
  modified_base 14: mod_base = OTHER; note = 2'-fluoroguanosine-3'-phosphate
  modified_base 15: mod_base = OTHER; note = 2'-O-methylguanosine-3'-phosphate
  modified_base 16: mod_base = OTHER; note = 2'-O-methylcytidine-3'-phosphate
  modified_base 17: mod_base = OTHER; note = 2'-O-methyluridine-3'-phosphate
  modified_base 18: mod_base = OTHER; note = 2'-O-methyluridine-3'-phosphate
  modified_base 19: mod_base = OTHER; note = 2'-O-methyladenosine-3'-phosphate
  modified_base 20: mod_base = OTHER; note = 2'-O-methylguanosine-3'-phosphate
  modified_base 21: mod_base = OTHER; note = 2'-O-methyladenosine-3'- phosphorothioate
  modified_base 22: mod_base = OTHER; note = 2'-O-methyluridine-3'-phosphorothioate
  modified_base 23: mod_base = OTHER; note = 2'-O-methylguanosine-3'-phosphate
  misc_feature 1: note = RNA
  misc_feature 2: note = DNA
  misc_feature 3..4: note = RNA
  misc_feature 5: note = DNA
  misc_feature 6: note = RNA
  misc_feature 7: note = DNA
  misc_feature 8..11: note = RNA
  misc_feature 12: note = DNA
  misc_feature 13..23: note = RNA
tcagaccaacttaggcttagatg

SEQ ID NO: 1253 - RNA, 23 nt, synthetic construct
  source 1..23: mol_type = other RNA
  modified_base 1: mod_base = OTHER; note = Vinyl-phosphonate 2'-O-methyluridine-3'-phosphorothioate
  modified_base 2: mod_base = OTHER; note = 2'-fluoroguanosine-3'-phosphorothioate
  modified_base 3: mod_base = OTHER; note = 2'-O-methylcytidine-3'-phosphate
  modified_base 4: mod_base = OTHER; note = 2'-O-methyladenosine-3'-phosphate
  modified_base 5: mod_base = OTHER; note = 2'-O-methylguanosine-3'-phosphate
  modified_base 6: mod_base = OTHER; note = 2'-fluoroadenosine-3'-phosphate
  modified_base 7: mod_base = OTHER; note = 2'-O-methylcytidine-3'-phosphate
  modified_base 8: mod_base = OTHER; note = 2'-fluorocytidine-3'-phosphate
  modified_base 9: mod_base = OTHER; note = 2'-fluoroadenosine-3'-phosphate
  modified_base 10: mod_base = OTHER; note = 2'-O-methyladenosine-3'-phosphate
  modified_base 11: mod_base = OTHER; note = 2'-O-methylcytidine-3'-phosphate
  modified_base 12: mod_base = OTHER; note = 2'-O-methyluridine-3'-phosphate
  modified_base 13: mod_base = OTHER; note = 2'-O-methyluridine-3'-phosphate
  modified_base 14: mod_base = OTHER; note = 2'-fluoroadenosine-3'-phosphate
  modified_base 15: mod_base = OTHER; note = 2'-O-methylguanosine-3'-phosphate
  modified_base 16: mod_base = OTHER; note = 2'-fluoroguanosine-3'-phosphate
  modified_base 17: mod_base = OTHER; note = 2'-O-methylcytidine-3'-phosphate
  modified_base 18: mod_base = OTHER; note = 2'-O-methyluridine-3'-phosphate
  modified_base 19: mod_base = OTHER; note = 2'-O-methyluridine-3'-phosphate
  modified_base 20: mod_base = OTHER; note = 2'-O-methyladenosine-3'-phosphate
  modified_base 21: mod_base = OTHER; note = 2'-O-methylguanosine-3'- phosphorothioate
  modified_base 22: mod_base = OTHER; note = 2'-O-methyladenosine-3'- phosphorothioate
  modified_base 23: mod_base = OTHER; note = 2'-O-methyluridine-3'-phosphate
tgcagaccaacttaggcttagat

SEQ ID NO: 1254 - DNA, 23 bp, synthetic construct
  source 1..23: mol_type = other DNA
  modified_base 1: mod_base = OTHER; note = Vinyl-phosphonate 2'-O-methyluridine-3'-phosphorothioate
  modified_base 2: mod_base = OTHER; note = 2'-fluorouridine -3'-phosphorothioate
  modified_base 3: mod_base = OTHER; note = 2'-O-methylguanosine-3'-phosphate
  modified_base 4: mod_base = OTHER; note = 2'-O-methylcytidine-3'-phosphate
  modified_base 6: mod_base = OTHER; note = 2'-O-methylguanosine-3'-phosphate
  modified_base 7: mod_base = OTHER; note = Adenosine-glycol nucleic acid (GNA) S-Isomer
  modified_base 8: mod_base = OTHER; note = 2'-O-methylcytidine-3'-phosphate
  modified_base 9: mod_base = OTHER; note = 2'-O-methylcytidine-3'-phosphate
  modified_base 10: mod_base = OTHER; note = 2'-O-methyladenosine-3'-phosphate
  modified_base 11: mod_base = OTHER; note = 2'-O-methyladenosine-3'-phosphate
  modified_base 12: mod_base = OTHER; note = 2'-O-methylcytidine-3'-phosphate
  modified_base 13: mod_base = OTHER; note = 2'-O-methyluridine-3'-phosphate
  modified_base 14: mod_base = OTHER; note = 2'-fluorouridine-3'-phosphate
  modified_base 15: mod_base = OTHER; note = 2'-O-methyladenosine-3'-phosphate
  modified_base 16: mod_base = OTHER; note = 2'-fluoroguanosine-3'-phosphate
  modified_base 17: mod_base = OTHER; note = 2'-O-methylguanosine-3'-phosphate
  modified_base 18: mod_base = OTHER; note = 2'-O-methylcytidine-3'-phosphate
  modified_base 19: mod_base = OTHER; note = 2'-O-methyluridine-3'-phosphate
  modified_base 20: mod_base = OTHER; note = 2'-O-methyluridine-3'-phosphate
  modified_base 21: mod_base = OTHER; note = 2'-O-methyladenosine-3'- phosphorothioate
  modified_base 22: mod_base = OTHER; note = 2'-O-methylguanosine-3'- phosphorothioate
  modified_base 23: mod_base = OTHER; note = 2'-O-methyladenosine-3'-phosphate
  misc_feature 1..4: note = RNA
  misc_feature 5: note = DNA
  misc_feature 6..23: note = RNA
ttgcagaccaacttaggcttaga

SEQ ID NO: 1255 - DNA, 23 bp, synthetic construct
  source 1..23: mol_type = other DNA
  modified_base 1: mod_base = OTHER; note = Vinyl-phosphonate 2'-O-methyluridine-3'-phosphorothioate
  modified_base 2: mod_base = OTHER; note = 2'-fluorocytidine-3'-phosphorothioate
  modified_base 3: mod_base = OTHER; note = 2'-O-methylcytidine-3'-phosphate
  modified_base 4: mod_base = OTHER; note = 2'-O-methyluridine-3'-phosphate
  modified_base 6: mod_base = OTHER; note = 2'-O-methylcytidine-3'-phosphate
  modified_base 7: mod_base = OTHER; note = Adenosine-glycol nucleic acid (GNA) S-Isomer
  modified_base 8: mod_base = OTHER; note = 2'-O-methylguanosine-3'-phosphate
  modified_base 9: mod_base = OTHER; note = 2'-O-methyladenosine-3'-phosphate
  modified_base 10: mod_base = OTHER; note = 2'-O-methylcytidine-3'-phosphate
  modified_base 11: mod_base = OTHER; note = 2'-O-methylcytidine-3'-phosphate
  modified_base 12: mod_base = OTHER; note = 2'-O-methyladenosine-3'-phosphate
  modified_base 13: mod_base = OTHER; note = 2'-O-methyladenosine-3'-phosphate
  modified_base 14: mod_base = OTHER; note = 2'-fluorocytidine-3'-phosphate
  modified_base 15: mod_base = OTHER; note = 2'-O-methyluridine-3'-phosphate
  modified_base 16: mod_base = OTHER; note = 2'-fluorouridine-3'-phosphate
  modified_base 17: mod_base = OTHER; note = 2'-O-methyladenosine-3'-phosphate
  modified_base 18: mod_base = OTHER; note = 2'-O-methylguanosine-3'-phosphate
  modified_base 19: mod_base = OTHER; note = 2'-O-methylguanosine-3'-phosphate
  modified_base 20: mod_base = OTHER; note = 2'-O-methylcytidine-3'-phosphate
  modified_base 21: mod_base = OTHER; note = 2'-O-methyluridine-3'-phosphorothioate
  modified_base 22: mod_base = OTHER; note = 2'-O-methyluridine-3'-phosphorothioate
  modified_base 23: mod_base = OTHER; note = 2'-O-methyladenosine-3'-phosphate
  misc_feature 1..4: note = RNA
  misc_feature 5: note = DNA
  misc_feature 6..23: note = RNA
tcctgcagaccaacttaggctta

SEQ ID NO: 1256 - RNA, 23 nt, synthetic construct
  source 1..23: mol_type = other RNA
  modified_base 1: mod_base = OTHER; note = Vinyl-phosphonate 2'-O-methyluridine-3'-phosphorothioate
  modified_base 2: mod_base = OTHER; note = 2'-fluorocytidine-3'-phosphorothioate
  modified_base 3: mod_base = OTHER; note = 2'-O-methylguanosine-3'-phosphate
  modified_base 4: mod_base = OTHER; note = 2'-O-methylcytidine-3'-phosphate
  modified_base 5: mod_base = OTHER; note = 2'-O-methylcytidine-3'-phosphate
  modified_base 6: mod_base = OTHER; note = 2'-fluorouridine-3'-phosphate
  modified_base 7: mod_base = OTHER; note = 2'-O-methylguanosine-3'-phosphate
  modified_base 8: mod_base = OTHER; note = 2'-fluorocytidine-3'-phosphate
  modified_base 9: mod_base = OTHER; note = 2'-fluoroadenosine-3'-phosphate
  modified_base 10: mod_base = OTHER; note = 2'-O-methylguanosine-3'-phosphate
  modified_base 11: mod_base = OTHER; note = 2'-O-methyladenosine-3'-phosphate
  modified_base 12: mod_base = OTHER; note = 2'-O-methylcytidine-3'-phosphate
  modified_base 13: mod_base = OTHER; note = 2'-O-methylcytidine-3'-phosphate
  modified_base 14: mod_base = OTHER; note = 2'-fluoroadenosine-3'-phosphate
  modified_base 15: mod_base = OTHER; note = 2'-O-methyladenosine-3'-phosphate
  modified_base 16: mod_base = OTHER; note = 2'-fluorocytidine-3'-phosphate
  modified_base 17: mod_base = OTHER; note = 2'-O-methyluridine-3'-phosphate
  modified_base 18: mod_base = OTHER; note = 2'-O-methyluridine-3'-phosphate
  modified_base 19: mod_base = OTHER; note = 2'-O-methyladenosine-3'-phosphate
  modified_base 20: mod_base = OTHER; note = 2'-O-methylguanosine-3'-phosphate
  modified_base 21: mod_base = OTHER; note = 2'-O-methylguanosine-3'- phosphorothioate
  modified_base 22: mod_base = OTHER; note = 2'-O-methylcytidine-3'- phosphorothioate
  modified_base 23: mod_base = OTHER; note = 2'-O-methyluridine-3'-phosphate
tcgcctgcagaccaacttaggct

SEQ ID NO: 1257 - DNA, 23 bp, synthetic construct
  source 1..23: mol_type = other DNA
  modified_base 1: mod_base = OTHER; note = Vinyl-phosphonate 2'-O-methyluridine-3'-phosphorothioate
  modified_base 2: mod_base = OTHER; note = 2'-fluoroadenosine-3'-phosphorothioate
  modified_base 3: mod_base = OTHER; note = 2'-O-methylcytidine-3'-phosphate
  modified_base 4: mod_base = OTHER; note = 2'-O-methylguanosine-3'-phosphate
  modified_base 6: mod_base = OTHER; note = 2'-O-methylcytidine-3'-phosphate
  modified_base 7: mod_base = OTHER; note = Thymidine-glycol nucleic acid (GNA) S-Isomer
  modified_base 8: mod_base = OTHER; note = 2'-O-methylguanosine-3'-phosphate
  modified_base 9: mod_base = OTHER; note = 2'-O-methylcytidine-3'-phosphate
  modified_base 10: mod_base = OTHER; note = 2'-O-methyladenosine-3'-phosphate
  modified_base 11: mod_base = OTHER; note = 2'-O-methylguanosine-3'-phosphate
  modified_base 12: mod_base = OTHER; note = 2'-O-methyladenosine-3'-phosphate
  modified_base 13: mod_base = OTHER; note = 2'-O-methylcytidine-3'-phosphate
  modified_base 14: mod_base = OTHER; note = 2'-fluorocytidine-3'-phosphate
  modified_base 15: mod_base = OTHER; note = 2'-O-methyladenosine-3'-phosphate
  modified_base 16: mod_base = OTHER; note = 2'-fluoroadenosine-3'-phosphate
  modified_base 17: mod_base = OTHER; note = 2'-O-methylcytidine-3'-phosphate
  modified_base 18: mod_base = OTHER; note = 2'-O-methyluridine-3'-phosphate
  modified_base 19: mod_base = OTHER; note = 2'-O-methyluridine-3'-phosphate
  modified_base 20: mod_base = OTHER; note = 2'-O-methyladenosine-3'-phosphate
  modified_base 21: mod_base = OTHER; note = 2'-O-methylguanosine-3'- phosphorothioate
  modified_base 22: mod_base = OTHER; note = 2'-O-methylguanosine-3'- phosphorothioate
  modified_base 23: mod_base = OTHER; note = 2'-O-methylcytidine-3'-phosphate
  misc_feature 1..4: note = RNA
  misc_feature 5: note = DNA
  misc_feature 6: note = RNA
  misc_feature 7: note = DNA
  misc_feature 8..23: note = RNA
tacgcctgcagaccaacttaggc

SEQ ID NO: 1258 - RNA, 23 nt, synthetic construct
  source 1..23: mol_type = other RNA
  modified_base 1: mod_base = OTHER; note = Vinyl-phosphonate 2'-O-methyluridine-3'-phosphorothioate
  modified_base 2: mod_base = OTHER; note = 2'-fluoroadenosine-3'-phosphorothioate
  modified_base 3: mod_base = OTHER; note = 2'-O-methyladenosine-3'-phosphate
  modified_base 4: mod_base = OTHER; note = 2'-O-methylcytidine-3'-phosphate
  modified_base 5: mod_base = OTHER; note = 2'-O-methylguanosine-3'-phosphate
  modified_base 6: mod_base = OTHER; note = 2'-fluorocytidine-3'-phosphate
  modified_base 7: mod_base = OTHER; note = 2'-O-methylcytidine-3'-phosphate
  modified_base 8: mod_base = OTHER; note = 2'-fluorouridine-3'-phosphate
  modified_base 9: mod_base = OTHER; note = 2'-fluoroguanosine-3'-phosphate
  modified_base 10: mod_base = OTHER; note = 2'-O-methylcytidine-3'-phosphate
  modified_base 11: mod_base = OTHER; note = 2'-O-methyladenosine-3'-phosphate
  modified_base 12: mod_base = OTHER; note = 2'-O-methylguanosine-3'-phosphate
  modified_base 13: mod_base = OTHER; note = 2'-O-methyladenosine-3'-phosphate
  modified_base 14: mod_base = OTHER; note = 2'-fluorocytidine-3'-phosphate
  modified_base 15: mod_base = OTHER; note = 2'-O-methylcytidine-3'-phosphate
  modified_base 16: mod_base = OTHER; note = 2'-fluoroadenosine-3'-phosphate
  modified_base 17: mod_base = OTHER; note = 2'-O-methyladenosine-3'-phosphate
  modified_base 18: mod_base = OTHER; note = 2'-O-methylcytidine-3'-phosphate
  modified_base 19: mod_base = OTHER; note = 2'-O-methyluridine-3'-phosphate
  modified_base 20: mod_base = OTHER; note = 2'-O-methyluridine-3'-phosphate
  modified_base 21: mod_base = OTHER; note = 2'-O-methyladenosine-3'- phosphorothioate
  modified_base 22: mod_base = OTHER; note = 2'-O-methylguanosine-3'- phosphorothioate
  modified_base 23: mod_base = OTHER; note = 2'-O-methylguanosine-3'-phosphate
taacgcctgcagaccaacttagg

SEQ ID NO: 1259 - DNA, 23 bp, synthetic construct
  source 1..23: mol_type = other DNA
  modified_base 1: mod_base = OTHER; note = Vinyl-phosphonate 2'-O-methyluridine-3'-phosphorothioate
  modified_base 2: mod_base = OTHER; note = 2'-deoxyadenosine-3'-phosphorothioate
  modified_base 3: mod_base = OTHER; note = 2'-O-methyladenosine-3'-phosphate
  modified_base 4: mod_base = OTHER; note = 2'-O-methylcytidine-3'-phosphate
  modified_base 6: mod_base = OTHER; note = 2'-O-methylcytidine-3'-phosphate
  modified_base 8: mod_base = OTHER; note = 2'-O-methyluridine-3'-phosphate
  modified_base 9: mod_base = OTHER; note = 2'-O-methylguanosine-3'-phosphate
  modified_base 10: mod_base = OTHER; note = 2'-O-methylcytidine-3'-phosphate
  modified_base 11: mod_base = OTHER; note = 2'-O-methyladenosine-3'-phosphate
  modified_base 13: mod_base = OTHER; note = 2'-O-methyladenosine-3'-phosphate
  modified_base 14: mod_base = OTHER; note = 2'-fluorocytidine-3'-phosphate
  modified_base 15: mod_base = OTHER; note = 2'-O-methylcytidine-3'-phosphate
  modified_base 16: mod_base = OTHER; note = 2'-O-methyladenosine-3'-phosphate
  modified_base 17: mod_base = OTHER; note = 2'-O-methyladenosine-3'-phosphate
  modified_base 18: mod_base = OTHER; note = 2'-O-methylcytidine-3'-phosphate
  modified_base 19: mod_base = OTHER; note = 2'-O-methyluridine-3'-phosphate
  modified_base 20: mod_base = OTHER; note = 2'-O-methyluridine-3'-phosphate
  modified_base 21: mod_base = OTHER; note = 2'-O-methyladenosine-3'- phosphorothioate
  modified_base 22: mod_base = OTHER; note = 2'-O-methylguanosine-3'- phosphorothioate
  modified_base 23: mod_base = OTHER; note = 2'-O-methylguanosine-3'-phosphate
  misc_feature 1: note = RNA
  misc_feature 2: note = DNA
  misc_feature 3..4: note = RNA
  misc_feature 5: note = DNA
  misc_feature 6: note = RNA
  misc_feature 7: note = DNA
  misc_feature 8..11: note = RNA
  misc_feature 12: note = DNA
  misc_feature 13..23: note = RNA
taacgcctgcagaccaacttagg

SEQ ID NO: 1260 - RNA, 23 nt, synthetic construct
  source 1..23: mol_type = other RNA
  modified_base 1: mod_base = OTHER; note = Vinyl-phosphonate 2'-O-methyluridine-3'-phosphorothioate
  modified_base 2: mod_base = OTHER; note = 2'-fluorocytidine-3'-phosphorothioate
  modified_base 3: mod_base = OTHER; note = 2'-O-methyladenosine-3'-phosphate
  modified_base 4: mod_base = OTHER; note = 2'-O-methyladenosine-3'-phosphate
  modified_base 5: mod_base = OTHER; note = 2'-O-methyladenosine-3'-phosphate
  modified_base 6: mod_base = OTHER; note = 2'-fluorocytidine-3'-phosphate
  modified_base 7: mod_base = OTHER; note = 2'-O-methylguanosine-3'-phosphate
  modified_base 8: mod_base = OTHER; note = 2'-fluorocytidine-3'-phosphate
  modified_base 9: mod_base = OTHER; note = 2'-fluorocytidine-3'-phosphate
  modified_base 10: mod_base = OTHER; note = 2'-O-methyluridine-3'-phosphate
  modified_base 11: mod_base = OTHER; note = 2'-O-methylguanosine-3'-phosphate
  modified_base 12: mod_base = OTHER; note = 2'-O-methylcytidine-3'-phosphate
  modified_base 13: mod_base = OTHER; note = 2'-O-methyladenosine-3'-phosphate
  modified_base 14: mod_base = OTHER; note = 2'-fluoroguanosine-3'-phosphate
  modified_base 15: mod_base = OTHER; note = 2'-O-methyladenosine-3'-phosphate
  modified_base 16: mod_base = OTHER; note = 2'-fluorocytidine-3'-phosphate
  modified_base 17: mod_base = OTHER; note = 2'-O-methylcytidine-3'-phosphate
  modified_base 18: mod_base = OTHER; note = 2'-O-methyladenosine-3'-phosphate
  modified_base 19: mod_base = OTHER; note = 2'-O-methyladenosine-3'-phosphate
  modified_base 20: mod_base = OTHER; note = 2'-O-methylcytidine-3'-phosphate
  modified_base 21: mod_base = OTHER; note = 2'-O-methyluridine-3'-phosphorothioate
  modified_base 22: mod_base = OTHER; note = 2'-O-methyluridine-3'-phosphorothioate
  modified_base 23: mod_base = OTHER; note = 2'-O-methyladenosine-3'-phosphate
tcaaacgcctgcagaccaactta

SEQ ID NO: 1261 - DNA, 23 bp, synthetic construct
  source 1..23: mol_type = other DNA
  modified_base 1: mod_base = OTHER; note = Vinyl-phosphonate 2'-O-methyluridine-3'-phosphorothioate
  modified_base 2: mod_base = OTHER; note = 2'-deoxycytidine-3'-phosphorothioate
  modified_base 3: mod_base = OTHER; note = 2'-O-methyladenosine-3'-phosphate
  modified_base 4: mod_base = OTHER; note = 2'-O-methyladenosine-3'-phosphate
  modified_base 6: mod_base = OTHER; note = 2'-O-methylcytidine-3'-phosphate
  modified_base 8: mod_base = OTHER; note = 2'-O-methylcytidine-3'-phosphate
  modified_base 9: mod_base = OTHER; note = 2'-O-methylcytidine-3'-phosphate
  modified_base 10: mod_base = OTHER; note = 2'-O-methyluridine-3'-phosphate
  modified_base 11: mod_base = OTHER; note = 2'-O-methylguanosine-3'-phosphate
  modified_base 13: mod_base = OTHER; note = 2'-O-methyladenosine-3'-phosphate
  modified_base 14: mod_base = OTHER; note = 2'-fluoroguanosine-3'-phosphate
  modified_base 15: mod_base = OTHER; note = 2'-O-methyladenosine-3'-phosphate
  modified_base 16: mod_base = OTHER; note = 2'-O-methylcytidine-3'-phosphate
  modified_base 17: mod_base = OTHER; note = 2'-O-methylcytidine-3'-phosphate
  modified_base 18: mod_base = OTHER; note = 2'-O-methyladenosine-3'-phosphate
  modified_base 19: mod_base = OTHER; note = 2'-O-methyladenosine-3'-phosphate
  modified_base 20: mod_base = OTHER; note = 2'-O-methylcytidine-3'-phosphate
  modified_base 21: mod_base = OTHER; note = 2'-O-methyluridine-3'-phosphorothioate
  modified_base 22: mod_base = OTHER; note = 2'-O-methyluridine-3'-phosphorothioate
  modified_base 23: mod_base = OTHER; note = 2'-O-methyladenosine-3'-phosphate
  misc_feature 1: note = RNA
  misc_feature 2: note = DNA
  misc_feature 3..4: note = RNA
  misc_feature 5: note = DNA
  misc_feature 6: note = RNA
  misc_feature 7: note = DNA
  misc_feature 8..11: note = RNA
  misc_feature 12: note = DNA
  misc_feature 13..23: note = RNA
tcaaacgcctgcagaccaactta

SEQ ID NO: 1262 - RNA, 23 nt, synthetic construct
  source 1..23: mol_type = other RNA
  modified_base 1: mod_base = OTHER; note = Vinyl-phosphonate 2'-O-methyluridine-3'-phosphorothioate
  modified_base 2: mod_base = OTHER; note = 2'-fluoroadenosine-3'-phosphorothioate
  modified_base 3: mod_base = OTHER; note = 2'-O-methyluridine-3'-phosphate
  modified_base 4: mod_base = OTHER; note = 2'-O-methyluridine-3'-phosphate
  modified_base 5: mod_base = OTHER; note = 2'-O-methylcytidine-3'-phosphate
  modified_base 6: mod_base = OTHER; note = 2'-fluoroadenosine-3'-phosphate
  modified_base 7: mod_base = OTHER; note = 2'-O-methyladenosine-3'-phosphate
  modified_base 8: mod_base = OTHER; note = 2'-fluoroadenosine-3'-phosphate
  modified_base 9: mod_base = OTHER; note = 2'-fluorocytidine-3'-phosphate
  modified_base 10: mod_base = OTHER; note = 2'-O-methylguanosine-3'-phosphate
  modified_base 11: mod_base = OTHER; note = 2'-O-methylcytidine-3'-phosphate
  modified_base 12: mod_base = OTHER; note = 2'-O-methylcytidine-3'-phosphate
  modified_base 13: mod_base = OTHER; note = 2'-O-methyluridine-3'-phosphate
  modified_base 14: mod_base = OTHER; note = 2'-fluoroguanosine-3'-phosphate
  modified_base 15: mod_base = OTHER; note = 2'-O-methylcytidine-3'-phosphate
  modified_base 16: mod_base = OTHER; note = 2'-fluoroadenosine-3'-phosphate
  modified_base 17: mod_base = OTHER; note = 2'-O-methylguanosine-3'-phosphate
  modified_base 18: mod_base = OTHER; note = 2'-O-methyladenosine-3'-phosphate
  modified_base 19: mod_base = OTHER; note = 2'-O-methylcytidine-3'-phosphate
  modified_base 20: mod_base = OTHER; note = 2'-O-methylcytidine-3'-phosphate
  modified_base 21: mod_base = OTHER; note = 2'-O-methyladenosine-3'- phosphorothioate
  modified_base 22: mod_base = OTHER; note = 2'-O-methyladenosine-3'- phosphorothioate
  modified_base 23: mod_base = OTHER; note = 2'-O-methylcytidine-3'-phosphate
tattcaaacgcctgcagaccaac

SEQ ID NO: 1263 - DNA, 23 bp, synthetic construct
  source 1..23: mol_type = other DNA
  modified_base 1: mod_base = OTHER; note = Vinyl-phosphonate 2'-O-methyluridine-3'-phosphorothioate
  modified_base 2: mod_base = OTHER; note = 2'-deoxyadenosine-3'-phosphorothioate
  modified_base 3: mod_base = OTHER; note = 2'-O-methyluridine-3'-phosphate
  modified_base 4: mod_base = OTHER; note = 2'-O-methyluridine-3'-phosphate
  modified_base 6: mod_base = OTHER; note = 2'-O-methyladenosine-3'-phosphate
  modified_base 8: mod_base = OTHER; note = 2'-O-methyladenosine-3'-phosphate
  modified_base 9: mod_base = OTHER; note = 2'-O-methylcytidine-3'-phosphate
  modified_base 10: mod_base = OTHER; note = 2'-O-methylguanosine-3'-phosphate
  modified_base 11: mod_base = OTHER; note = 2'-O-methylcytidine-3'-phosphate
  modified_base 13: mod_base = OTHER; note = 2'-O-methyluridine-3'-phosphate
  modified_base 14: mod_base = OTHER; note = 2'-fluoroguanosine-3'-phosphate
  modified_base 15: mod_base = OTHER; note = 2'-O-methylcytidine-3'-phosphate
  modified_base 16: mod_base = OTHER; note = 2'-O-methyladenosine-3'-phosphate
  modified_base 17: mod_base = OTHER; note = 2'-O-methylguanosine-3'-phosphate
  modified_base 18: mod_base = OTHER; note = 2'-O-methyladenosine-3'-phosphate
  modified_base 19: mod_base = OTHER; note = 2'-O-methylcytidine-3'-phosphate
  modified_base 20: mod_base = OTHER; note = 2'-O-methylcytidine-3'-phosphate
  modified_base 21: mod_base = OTHER; note = 2'-O-methyladenosine-3'- phosphorothioate
  modified_base 22: mod_base = OTHER; note = 2'-O-methyladenosine-3'- phosphorothioate
  modified_base 23: mod_base = OTHER; note = 2'-O-methylcytidine-3'-phosphate
  misc_feature 1: note = RNA
  misc_feature 2: note = DNA
  misc_feature 3..4: note = RNA
  misc_feature 5: note = DNA
  misc_feature 6: note = RNA
  misc_feature 7: note = DNA
  misc_feature 8..11: note = RNA
  misc_feature 12: note = DNA
  misc_feature 13..23: note = RNA
tattcaaacgcctgcagaccaac

SEQ ID NO: 1264 - DNA, 23 bp, synthetic construct
  source 1..23: mol_type = other DNA
  modified_base 1: mod_base = OTHER; note = Vinyl-phosphonate 2'-O-methyluridine-3'-phosphorothioate
  modified_base 2: mod_base = OTHER; note = 2'-fluorocytidine-3'-phosphorothioate
  modified_base 3: mod_base = OTHER; note = 2'-O-methyladenosine-3'-phosphate
  modified_base 4: mod_base = OTHER; note = 2'-O-methyluridine-3'-phosphate
  modified_base 6: mod_base = OTHER; note = 2'-O-methylcytidine-3'-phosphate
  modified_base 7: mod_base = OTHER; note = Adenosine-glycol nucleic acid (GNA) S-Isomer
  modified_base 8: mod_base = OTHER; note = 2'-O-methyladenosine-3'-phosphate
  modified_base 9: mod_base = OTHER; note = 2'-O-methyladenosine-3'-phosphate
  modified_base 10: mod_base = OTHER; note = 2'-O-methylcytidine-3'-phosphate
  modified_base 11: mod_base = OTHER; note = 2'-O-methylguanosine-3'-phosphate
  modified_base 12: mod_base = OTHER; note = 2'-O-methylcytidine-3'-phosphate
  modified_base 13: mod_base = OTHER; note = 2'-O-methylcytidine-3'-phosphate
  modified_base 14: mod_base = OTHER; note = 2'-fluorouridine-3'-phosphate
  modified_base 15: mod_base = OTHER; note = 2'-O-methylguanosine-3'-phosphate
  modified_base 16: mod_base = OTHER; note = 2'-fluorocytidine-3'-phosphate
  modified_base 17: mod_base = OTHER; note = 2'-O-methyladenosine-3'-phosphate
  modified_base 18: mod_base = OTHER; note = 2'-O-methylguanosine-3'-phosphate
  modified_base 19: mod_base = OTHER; note = 2'-O-methyladenosine-3'-phosphate
  modified_base 20: mod_base = OTHER; note = 2'-O-methylcytidine-3'-phosphate
  modified_base 21: mod_base = OTHER; note = 2'-O-methylcytidine-3'- phosphorothioate
  modified_base 22: mod_base = OTHER; note = 2'-O-methyladenosine-3'- phosphorothioate
  modified_base 23: mod_base = OTHER; note = 2'-O-methyladenosine-3'-phosphate
  misc_feature 1..4: note = RNA
  misc_feature 5: note = DNA
  misc_feature 6..23: note = RNA
tcattcaaacgcctgcagaccaa

SEQ ID NO: 1265 - RNA, 23 nt, synthetic construct
  source 1..23: mol_type = other RNA
  modified_base 1: mod_base = OTHER; note = Vinyl-phosphonate 2'-O-methyluridine-3'-phosphorothioate
  modified_base 2: mod_base = OTHER; note = 2'-fluorocytidine-3'-phosphorothioate
  modified_base 3: mod_base = OTHER; note = 2'-O-methyladenosine-3'-phosphate
  modified_base 4: mod_base = OTHER; note = 2'-O-methyluridine-3'-phosphate
  modified_base 5: mod_base = OTHER; note = 2'-O-methyluridine-3'-phosphate
  modified_base 6: mod_base = OTHER; note = 2'-fluorocytidine-3'-phosphate
  modified_base 7: mod_base = OTHER; note = 2'-O-methyladenosine-3'-phosphate
  modified_base 8: mod_base = OTHER; note = 2'-fluoroadenosine-3'-phosphate
  modified_base 9: mod_base = OTHER; note = 2'-fluoroadenosine-3'-phosphate
  modified_base 10: mod_base = OTHER; note = 2'-O-methylcytidine-3'-phosphate
  modified_base 11: mod_base = OTHER; note = 2'-O-methylguanosine-3'-phosphate
  modified_base 12: mod_base = OTHER; note = 2'-O-methylcytidine-3'-phosphate
  modified_base 13: mod_base = OTHER; note = 2'-O-methylcytidine-3'-phosphate
  modified_base 14: mod_base = OTHER; note = 2'-fluorouridine-3'-phosphate
  modified_base 15: mod_base = OTHER; note = 2'-O-methylguanosine-3'-phosphate
  modified_base 16: mod_base = OTHER; note = 2'-fluorocytidine-3'-phosphate
  modified_base 17: mod_base = OTHER; note = 2'-O-methyladenosine-3'-phosphate
  modified_base 18: mod_base = OTHER; note = 2'-O-methylguanosine-3'-phosphate
  modified_base 19: mod_base = OTHER; note = 2'-O-methyladenosine-3'-phosphate
  modified_base 20: mod_base = OTHER; note = 2'-O-methylcytidine-3'-phosphate
  modified_base 21: mod_base = OTHER; note = 2'-O-methylcytidine-3'- phosphorothioate
  modified_base 22: mod_base = OTHER; note = 2'-O-methyladenosine-3'- phosphorothioate
  modified_base 23: mod_base = OTHER; note = 2'-O-methyladenosine-3'-phosphate
tcattcaaacgcctgcagaccaa

SEQ ID NO: 1266 - DNA, 23 bp, synthetic construct
  source 1..23: mol_type = other DNA
  modified_base 1: mod_base = OTHER; note = Vinyl-phosphonate 2'-O-methyluridine-3'-phosphorothioate
  modified_base 2: mod_base = OTHER; note = 2'-deoxycytidine-3'-phosphorothioate
  modified_base 3: mod_base = OTHER; note = 2'-O-methyladenosine-3'-phosphate
  modified_base 4: mod_base = OTHER; note = 2'-O-methyluridine-3'-phosphate
  modified_base 6: mod_base = OTHER; note = 2'-O-methylcytidine-3'-phosphate
  modified_base 8: mod_base = OTHER; note = 2'-O-methyladenosine-3'-phosphate
  modified_base 9: mod_base = OTHER; note = 2'-O-methyladenosine-3'-phosphate
  modified_base 10: mod_base = OTHER; note = 2'-O-methylcytidine-3'-phosphate
  modified_base 11: mod_base = OTHER; note = 2'-O-methylguanosine-3'-phosphate
  modified_base 13: mod_base = OTHER; note = 2'-O-methylcytidine-3'-phosphate
  modified_base 14: mod_base = OTHER; note = 2'-fluorouridine-3'-phosphate
  modified_base 15: mod_base = OTHER; note = 2'-O-methylguanosine-3'-phosphate
  modified_base 16: mod_base = OTHER; note = 2'-O-methylcytidine-3'-phosphate
  modified_base 17: mod_base = OTHER; note = 2'-O-methyladenosine-3'-phosphate
  modified_base 18: mod_base = OTHER; note = 2'-O-methylguanosine-3'-phosphate
  modified_base 19: mod_base = OTHER; note = 2'-O-methyladenosine-3'-phosphate
  modified_base 20: mod_base = OTHER; note = 2'-O-methylcytidine-3'-phosphate
  modified_base 21: mod_base = OTHER; note = 2'-O-methylcytidine-3'- phosphorothioate
  modified_base 22: mod_base = OTHER; note = 2'-O-methyladenosine-3'- phosphorothioate
  modified_base 23: mod_base = OTHER; note = 2'-O-methyladenosine-3'-phosphate
  misc_feature 1: note = RNA
  misc_feature 2: note = DNA
  misc_feature 3..4: note = RNA
  misc_feature 5: note = DNA
  misc_feature 6: note = RNA
  misc_feature 7: note = DNA
  misc_feature 8..11: note = RNA
  misc_feature 12: note = DNA
  misc_feature 13..23: note = RNA
tcattcaaacgcctgcagaccaa

SEQ ID NO: 1267 - RNA, 23 nt, synthetic construct
  source 1..23: mol_type = other RNA
  modified_base 1: mod_base = OTHER; note = Vinyl-phosphonate 2'-O-methyluridine-3'-phosphorothioate
  modified_base 2: mod_base = OTHER; note = 2'-fluorocytidine-3'-phosphorothioate
  modified_base 3: mod_base = OTHER; note = 2'-O-methyluridine-3'-phosphate
  modified_base 4: mod_base = OTHER; note = 2'-O-methylcytidine-3'-phosphate
  modified_base 5: mod_base = OTHER; note = 2'-O-methyladenosine-3'-phosphate
  modified_base 6: mod_base = OTHER; note = 2'-fluorouridine-3'-phosphate
  modified_base 7: mod_base = OTHER; note = 2'-O-methyluridine-3'-phosphate
  modified_base 8: mod_base = OTHER; note = 2'-fluorocytidine-3'-phosphate
  modified_base 9: mod_base = OTHER; note = 2'-fluoroadenosine-3'-phosphate
  modified_base 10: mod_base = OTHER; note = 2'-O-methyladenosine-3'-phosphate
  modified_base 11: mod_base = OTHER; note = 2'-O-methyladenosine-3'-phosphate
  modified_base 12: mod_base = OTHER; note = 2'-O-methylcytidine-3'-phosphate
  modified_base 13: mod_base = OTHER; note = 2'-O-methylguanosine-3'-phosphate
  modified_base 14: mod_base = OTHER; note = 2'-fluorocytidine-3'-phosphate
  modified_base 15: mod_base = OTHER; note = 2'-O-methylcytidine-3'-phosphate
  modified_base 16: mod_base = OTHER; note = 2'-fluorouridine-3'-phosphate
  modified_base 17: mod_base = OTHER; note = 2'-O-methylguanosine-3'-phosphate
  modified_base 18: mod_base = OTHER; note = 2'-O-methylcytidine-3'-phosphate
  modified_base 19: mod_base = OTHER; note = 2'-O-methyladenosine-3'-phosphate
  modified_base 20: mod_base = OTHER; note = 2'-O-methylguanosine-3'-phosphate
  modified_base 21: mod_base = OTHER; note = 2'-O-methyladenosine-3'- phosphorothioate
  modified_base 22: mod_base = OTHER; note = 2'-O-methylcytidine-3'- phosphorothioate
  modified_base 23: mod_base = OTHER; note = 2'-O-methylcytidine-3'-phosphate
tctcattcaaacgcctgcagacc

SEQ ID NO: 1268 - DNA, 23 bp, synthetic construct
  source 1..23: mol_type = other DNA
  modified_base 1: mod_base = OTHER; note = Vinyl-phosphonate 2'-O-methyluridine-3'-phosphorothioate
  modified_base 2: mod_base = OTHER; note = 2'-deoxycytidine-3'-phosphorothioate
  modified_base 3: mod_base = OTHER; note = 2'-O-methyluridine-3'-phosphate
  modified_base 4: mod_base = OTHER; note = 2'-O-methylcytidine-3'-phosphate
  modified_base 6: mod_base = OTHER; note = 2'-O-methyluridine-3'-phosphate
  modified_base 8: mod_base = OTHER; note = 2'-O-methylcytidine-3'-phosphate
  modified_base 9: mod_base = OTHER; note = 2'-O-methyladenosine-3'-phosphate
  modified_base 10: mod_base = OTHER; note = 2'-O-methyladenosine-3'-phosphate
  modified_base 11: mod_base = OTHER; note = 2'-O-methyladenosine-3'-phosphate
  modified_base 13: mod_base = OTHER; note = 2'-O-methylguanosine-3'-phosphate
  modified_base 14: mod_base = OTHER; note = 2'-fluorocytidine-3'-phosphate
  modified_base 15: mod_base = OTHER; note = 2'-O-methylcytidine-3'-phosphate
  modified_base 16: mod_base = OTHER; note = 2'-O-methyluridine-3'-phosphate
  modified_base 17: mod_base = OTHER; note = 2'-O-methylguanosine-3'-phosphate
  modified_base 18: mod_base = OTHER; note = 2'-O-methylcytidine-3'-phosphate
  modified_base 19: mod_base = OTHER; note = 2'-O-methyladenosine-3'-phosphate
  modified_base 20: mod_base = OTHER; note = 2'-O-methylguanosine-3'-phosphate
  modified_base 21: mod_base = OTHER; note = 2'-O-methyladenosine-3'- phosphorothioate
  modified_base 22: mod_base = OTHER; note = 2'-O-methylcytidine-3'- phosphorothioate
  modified_base 23: mod_base = OTHER; note = 2'-O-methylcytidine-3'-phosphate
  misc_feature 1: note = RNA
  misc_feature 2: note = DNA
  misc_feature 3..4: note = RNA
  misc_feature 5: note = DNA
  misc_feature 6: note = RNA
  misc_feature 7: note = DNA
  misc_feature 8..11: note = RNA
  misc_feature 12: note = DNA
  misc_feature 13..23: note = RNA
tctcattcaaacgcctgcagacc

SEQ ID NO: 1269 - DNA, 23 bp, synthetic construct
  source 1..23: mol_type = other DNA
  modified_base 1: mod_base = OTHER; note = Vinyl-phosphonate 2'-O-methyluridine-3'-phosphorothioate
  modified_base 2: mod_base = OTHER; note = 2'-fluoroadenosine-3'-phosphorothioate
  modified_base 3: mod_base = OTHER; note = 2'-O-methylcytidine-3'-phosphate
  modified_base 4: mod_base = OTHER; note = 2'-O-methyluridine-3'-phosphate
  modified_base 6: mod_base = OTHER; note = 2'-O-methyladenosine-3'-phosphate
  modified_base 7: mod_base = OTHER; note = Thymidine-glycol nucleic acid (GNA) S-Isomer
  modified_base 8: mod_base = OTHER; note = 2'-O-methyluridine-3'-phosphate
  modified_base 9: mod_base = OTHER; note = 2'-O-methylcytidine-3'-phosphate
  modified_base 10: mod_base = OTHER; note = 2'-O-methyladenosine-3'-phosphate
  modified_base 11: mod_base = OTHER; note = 2'-O-methyladenosine-3'-phosphate
  modified_base 12: mod_base = OTHER; note = 2'-O-methyladenosine-3'-phosphate
  modified_base 13: mod_base = OTHER; note = 2'-O-methylcytidine-3'-phosphate
  modified_base 14: mod_base = OTHER; note = 2'-fluoroguanosine-3'-phosphate
  modified_base 15: mod_base = OTHER; note = 2'-O-methylcytidine-3'-phosphate
  modified_base 16: mod_base = OTHER; note = 2'-fluorocytidine-3'-phosphate
  modified_base 17: mod_base = OTHER; note = 2'-O-methyluridine-3'-phosphate
  modified_base 18: mod_base = OTHER; note = 2'-O-methylguanosine-3'-phosphate
  modified_base 19: mod_base = OTHER; note = 2'-O-methylcytidine-3'-phosphate
  modified_base 20: mod_base = OTHER; note = 2'-O-methyladenosine-3'-phosphate
  modified_base 21: mod_base = OTHER; note = 2'-O-methylguanosine-3'- phosphorothioate
  modified_base 22: mod_base = OTHER; note = 2'-O-methyladenosine-3'- phosphorothioate
  modified_base 23: mod_base = OTHER; note = 2'-O-methylcytidine-3'-phosphate
  misc_feature 1..4: note = RNA
  misc_feature 5: note = DNA
  misc_feature 6: note = RNA
  misc_feature 7: note = DNA
  misc_feature 8..23: note = RNA
tactcattcaaacgcctgcagac

SEQ ID NO: 1270 - RNA, 23 nt, synthetic construct
  source 1..23: mol_type = other RNA
  modified_base 1: mod_base = OTHER; note = Vinyl-phosphonate 2'-O-methyluridine-3'-phosphorothioate
  modified_base 2: mod_base = OTHER; note = 2'-fluoroadenosine-3'-phosphorothioate
  modified_base 3: mod_base = OTHER; note = 2'-O-methylcytidine-3'-phosphate
  modified_base 4: mod_base = OTHER; note = 2'-O-methyluridine-3'-phosphate
  modified_base 5: mod_base = OTHER; note = 2'-O-methylcytidine-3'-phosphate
  modified_base 6: mod_base = OTHER; note = 2'-fluoroadenosine-3'-phosphate
  modified_base 7: mod_base = OTHER; note = 2'-O-methyluridine-3'-phosphate
  modified_base 8: mod_base = OTHER; note = 2'-fluorouridine-3'-phosphate
  modified_base 9: mod_base = OTHER; note = 2'-fluorocytidine-3'-phosphate
  modified_base 10: mod_base = OTHER; note = 2'-O-methyladenosine-3'-phosphate
  modified_base 11: mod_base = OTHER; note = 2'-O-methyladenosine-3'-phosphate
  modified_base 12: mod_base = OTHER; note = 2'-O-methyladenosine-3'-phosphate
  modified_base 13: mod_base = OTHER; note = 2'-O-methylcytidine-3'-phosphate
  modified_base 14: mod_base = OTHER; note = 2'-fluoroguanosine-3'-phosphate
  modified_base 15: mod_base = OTHER; note = 2'-O-methylcytidine-3'-phosphate
  modified_base 16: mod_base = OTHER; note = 2'-fluorocytidine-3'-phosphate
  modified_base 17: mod_base = OTHER; note = 2'-O-methyluridine-3'-phosphate
  modified_base 18: mod_base = OTHER; note = 2'-O-methylguanosine-3'-phosphate
  modified_base 19: mod_base = OTHER; note = 2'-O-methylcytidine-3'-phosphate
  modified_base 20: mod_base = OTHER; note = 2'-O-methyladenosine-3'-phosphate
  modified_base 21: mod_base = OTHER; note = 2'-O-methylguanosine-3'- phosphorothioate
  modified_base 22: mod_base = OTHER; note = 2'-O-methyladenosine-3'- phosphorothioate
  modified_base 23: mod_base = OTHER; note = 2'-O-methylcytidine-3'-phosphate
tactcattcaaacgcctgcagac

SEQ ID NO: 1271 - DNA, 23 bp, synthetic construct
  source 1..23: mol_type = other DNA
  modified_base 1: mod_base = OTHER; note = Vinyl-phosphonate 2'-O-methyluridine-3'-phosphorothioate
  modified_base 2: mod_base = OTHER; note = 2'-deoxyadenosine-3'-phosphorothioate
  modified_base 3: mod_base = OTHER; note = 2'-O-methylcytidine-3'-phosphate
  modified_base 4: mod_base = OTHER; note = 2'-O-methyluridine-3'-phosphate
  modified_base 6: mod_base = OTHER; note = 2'-O-methyladenosine-3'-phosphate
  modified_base 8: mod_base = OTHER; note = 2'-O-methyluridine-3'-phosphate
  modified_base 9: mod_base = OTHER; note = 2'-O-methylcytidine-3'-phosphate
  modified_base 10: mod_base = OTHER; note = 2'-O-methyladenosine-3'-phosphate
  modified_base 11: mod_base = OTHER; note = 2'-O-methyladenosine-3'-phosphate
  modified_base 13: mod_base = OTHER; note = 2'-O-methylcytidine-3'-phosphate
  modified_base 14: mod_base = OTHER; note = 2'-fluoroguanosine-3'-phosphate
  modified_base 15: mod_base = OTHER; note = 2'-O-methylcytidine-3'-phosphate
  modified_base 16: mod_base = OTHER; note = 2'-O-methylcytidine-3'-phosphate
  modified_base 17: mod_base = OTHER; note = 2'-O-methyluridine-3'-phosphate
  modified_base 18: mod_base = OTHER; note = 2'-O-methylguanosine-3'-phosphate
  modified_base 19: mod_base = OTHER; note = 2'-O-methylcytidine-3'-phosphate
  modified_base 20: mod_base = OTHER; note = 2'-O-methyladenosine-3'-phosphate
  modified_base 21: mod_base = OTHER; note = 2'-O-methylguanosine-3'- phosphorothioate
  modified_base 22: mod_base = OTHER; note = 2'-O-methyladenosine-3'- phosphorothioate
  modified_base 23: mod_base = OTHER; note = 2'-O-methylcytidine-3'-phosphate
  misc_feature 1: note = RNA
  misc_feature 2: note = DNA
  misc_feature 3..4: note = RNA
  misc_feature 5: note = DNA
  misc_feature 6: note = RNA
  misc_feature 7: note = DNA
  misc_feature 8..11: note = RNA
  misc_feature 12: note = DNA
  misc_feature 13..23: note = RNA
tactcattcaaacgcctgcagac

SEQ ID NO: 1272 - DNA, 23 bp, synthetic construct
  source 1..23: mol_type = other DNA
  modified_base 1: mod_base = OTHER; note = Vinyl-phosphonate 2'-O-methyluridine-3'-phosphorothioate
  modified_base 2: mod_base = OTHER; note = 2'-fluoroadenosine-3'-phosphorothioate
  modified_base 3: mod_base = OTHER; note = 2'-O-methyladenosine-3'-phosphate
  modified_base 4: mod_base = OTHER; note = 2'-O-methylcytidine-3'-phosphate
  modified_base 6: mod_base = OTHER; note = 2'-O-methylcytidine-3'-phosphate
  modified_base 7: mod_base = OTHER; note = Adenosine-glycol nucleic acid (GNA) S-Isomer
  modified_base 8: mod_base = OTHER; note = 2'-O-methyluridine-3'-phosphate
  modified_base 9: mod_base = OTHER; note = 2'-O-methyluridine-3'-phosphate
  modified_base 10: mod_base = OTHER; note = 2'-O-methylcytidine-3'-phosphate
  modified_base 11: mod_base = OTHER; note = 2'-O-methyladenosine-3'-phosphate
  modified_base 12: mod_base = OTHER; note = 2'-O-methyladenosine-3'-phosphate
  modified_base 13: mod_base = OTHER; note = 2'-O-methyladenosine-3'-phosphate
  modified_base 14: mod_base = OTHER; note = 2'-fluorocytidine-3'-phosphate
  modified_base 15: mod_base = OTHER; note = 2'-O-methylguanosine-3'-phosphate
  modified_base 16: mod_base = OTHER; note = 2'-fluorocytidine-3'-phosphate
  modified_base 17: mod_base = OTHER; note = 2'-O-methylcytidine-3'-phosphate
  modified_base 18: mod_base = OTHER; note = 2'-O-methyluridine-3'-phosphate
  modified_base 19: mod_base = OTHER; note = 2'-O-methylguanosine-3'-phosphate
  modified_base 20: mod_base = OTHER; note = 2'-O-methylcytidine-3'-phosphate
  modified_base 21: mod_base = OTHER; note = 2'-O-methyladenosine-3'- phosphorothioate
  modified_base 22: mod_base = OTHER; note = 2'-O-methylguanosine-3'- phosphorothioate
  modified_base 23: mod_base = OTHER; note = 2'-O-methyladenosine-3'-phosphate
  misc_feature 1..4: note = RNA
  misc_feature 5: note = DNA
  misc_feature 6..23: note = RNA
taactcattcaaacgcctgcaga

SEQ ID NO: 1273 - RNA, 23 nt, synthetic construct
  source 1..23: mol_type = other RNA
  modified_base 1: mod_base = OTHER; note = Vinyl-phosphonate 2'-O-methyluridine-3'-phosphorothioate
  modified_base 2: mod_base = OTHER; note = 2'-fluorocytidine-3'-phosphorothioate
  modified_base 3: mod_base = OTHER; note = 2'-O-methyladenosine-3'-phosphate
  modified_base 4: mod_base = OTHER; note = 2'-O-methyladenosine-3'-phosphate
  modified_base 5: mod_base = OTHER; note = 2'-O-methylcytidine-3'-phosphate
  modified_base 6: mod_base = OTHER; note = 2'-fluorouridine-3'-phosphate
  modified_base 7: mod_base = OTHER; note = 2'-O-methylcytidine-3'-phosphate
  modified_base 8: mod_base = OTHER; note = 2'-fluoroadenosine-3'-phosphate
  modified_base 9: mod_base = OTHER; note = 2'-fluorouridine-3'-phosphate
  modified_base 10: mod_base = OTHER; note = 2'-O-methyluridine-3'-phosphate
  modified_base 11: mod_base = OTHER; note = 2'-O-methylcytidine-3'-phosphate
  modified_base 12: mod_base = OTHER; note = 2'-O-methyladenosine-3'-phosphate
  modified_base 13: mod_base = OTHER; note = 2'-O-methyladenosine-3'-phosphate
  modified_base 14: mod_base = OTHER; note = 2'-fluoroadenosine-3'-phosphate
  modified_base 15: mod_base = OTHER; note = 2'-O-methylcytidine-3'-phosphate
  modified_base 16: mod_base = OTHER; note = 2'-fluoroguanosine-3'-phosphate
  modified_base 17: mod_base = OTHER; note = 2'-O-methylcytidine-3'-phosphate
  modified_base 18: mod_base = OTHER; note = 2'-O-methylcytidine-3'-phosphate
  modified_base 19: mod_base = OTHER; note = 2'-O-methyluridine-3'-phosphate
  modified_base 20: mod_base = OTHER; note = 2'-O-methylguanosine-3'-phosphate
  modified_base 21: mod_base = OTHER; note = 2'-O-methylcytidine-3'- phosphorothioate
  modified_base 22: mod_base = OTHER; note = 2'-O-methyladenosine-3'- phosphorothioate
  modified_base 23: mod_base = OTHER; note = 2'-O-methylguanosine-3'-phosphate
tcaactcattcaaacgcctgcag

SEQ ID NO: 1274 - DNA, 23 bp, synthetic construct
  source 1..23: mol_type = other DNA
  modified_base 1: mod_base = OTHER; note = Vinyl-phosphonate 2'-O-methyluridine-3'-phosphorothioate
  modified_base 2: mod_base = OTHER; note = 2'-deoxycytidine-3'-phosphorothioate
  modified_base 3: mod_base = OTHER; note = 2'-O-methyladenosine-3'-phosphate
  modified_base 4: mod_base = OTHER; note = 2'-O-methyladenosine-3'-phosphate
  modified_base 6: mod_base = OTHER; note = 2'-O-methyluridine-3'-phosphate
  modified_base 8: mod_base = OTHER; note = 2'-O-methyladenosine-3'-phosphate
  modified_base 9: mod_base = OTHER; note = 2'-O-methyluridine-3'-phosphate
  modified_base 10: mod_base = OTHER; note = 2'-O-methyluridine-3'-phosphate
  modified_base 11: mod_base = OTHER; note = 2'-O-methylcytidine-3'-phosphate
  modified_base 13: mod_base = OTHER; note = 2'-O-methyladenosine-3'-phosphate
  modified_base 14: mod_base = OTHER; note = 2'-fluoroadenosine-3'-phosphate
  modified_base 15: mod_base = OTHER; note = 2'-O-methylcytidine-3'-phosphate
  modified_base 16: mod_base = OTHER; note = 2'-O-methylguanosine-3'-phosphate
  modified_base 17: mod_base = OTHER; note = 2'-O-methylcytidine-3'-phosphate
  modified_base 18: mod_base = OTHER; note = 2'-O-methylcytidine-3'-phosphate
  modified_base 19: mod_base = OTHER; note = 2'-O-methyluridine-3'-phosphate
  modified_base 20: mod_base = OTHER; note = 2'-O-methylguanosine-3'-phosphate
  modified_base 21: mod_base = OTHER; note = 2'-O-methylcytidine-3'- phosphorothioate
  modified_base 22: mod_base = OTHER; note = 2'-O-methyladenosine-3'- phosphorothioate
  modified_base 23: mod_base = OTHER; note = 2'-O-methylguanosine-3'-phosphate
  misc_feature 1: note = RNA
  misc_feature 2: note = DNA
  misc_feature 3..4: note = RNA
  misc_feature 5: note = DNA
  misc_feature 6: note = RNA
  misc_feature 7: note = DNA
  misc_feature 8..11: note = RNA
  misc_feature 12: note = DNA
  misc_feature 13..23: note = RNA
tcaactcattcaaacgcctgcag

SEQ ID NO: 1275 - DNA, 23 bp, synthetic construct
  source 1..23: mol_type = other DNA
  modified_base 1: mod_base = OTHER; note = Vinyl-phosphonate 2'-O-methyluridine-3'-phosphorothioate
  modified_base 2: mod_base = OTHER; note = 2'-fluoroadenosine-3'-phosphorothioate
  modified_base 3: mod_base = OTHER; note = 2'-O-methylcytidine-3'-phosphate
  modified_base 4: mod_base = OTHER; note = 2'-O-methyladenosine-3'-phosphate
  modified_base 6: mod_base = OTHER; note = 2'-O-methylcytidine-3'-phosphate
  modified_base 7: mod_base = OTHER; note = Thymidine-glycol nucleic acid (GNA) S-Isomer
  modified_base 8: mod_base = OTHER; note = 2'-O-methylcytidine-3'-phosphate
  modified_base 9: mod_base = OTHER; note = 2'-O-methyladenosine-3'-phosphate
  modified_base 10: mod_base = OTHER; note = 2'-O-methyluridine-3'-phosphate
  modified_base 11: mod_base = OTHER; note = 2'-O-methyluridine-3'-phosphate
  modified_base 12: mod_base = OTHER; note = 2'-O-methylcytidine-3'-phosphate
  modified_base 13: mod_base = OTHER; note = 2'-O-methyladenosine-3'-phosphate
  modified_base 14: mod_base = OTHER; note = 2'-fluoroadenosine-3'-phosphate
  modified_base 15: mod_base = OTHER; note = 2'-O-methyladenosine-3'-phosphate
  modified_base 16: mod_base = OTHER; note = 2'-fluorocytidine-3'-phosphate
  modified_base 17: mod_base = OTHER; note = 2'-O-methylguanosine-3'-phosphate
  modified_base 18: mod_base = OTHER; note = 2'-O-methylcytidine-3'-phosphate
  modified_base 19: mod_base = OTHER; note = 2'-O-methylcytidine-3'-phosphate
  modified_base 20: mod_base = OTHER; note = 2'-O-methyluridine-3'-phosphate
  modified_base 21: mod_base = OTHER; note = 2'-O-methylguanosine-3'- phosphorothioate
  modified_base 22: mod_base = OTHER; note = 2'-O-methylcytidine-3'- phosphorothioate
  modified_base 23: mod_base = OTHER; note = 2'-O-methyladenosine-3'-phosphate
  misc_feature 1..4: note = RNA
  misc_feature 5: note = DNA
  misc_feature 6: note = RNA
  misc_feature 7: note = DNA
  misc_feature 8..23: note = RNA
tacaactcattcaaacgcctgca

SEQ ID NO: 1276 - RNA, 23 nt, synthetic construct
  source 1..23: mol_type = other RNA
  modified_base 1: mod_base = OTHER; note = Vinyl-phosphonate 2'-O-methyluridine-3'-phosphorothioate
  modified_base 2: mod_base = OTHER; note = 2'-fluoroadenosine-3'-phosphorothioate
  modified_base 3: mod_base = OTHER; note = 2'-O-methylcytidine-3'-phosphate
  modified_base 4: mod_base = OTHER; note = 2'-O-methyladenosine-3'-phosphate
  modified_base 5: mod_base = OTHER; note = 2'-O-methyladenosine-3'-phosphate
  modified_base 6: mod_base = OTHER; note = 2'-fluorocytidine-3'-phosphate
  modified_base 7: mod_base = OTHER; note = 2'-O-methyluridine-3'-phosphate
  modified_base 8: mod_base = OTHER; note = 2'-fluorocytidine-3'-phosphate
  modified_base 9: mod_base = OTHER; note = 2'-fluoroadenosine-3'-phosphate
  modified_base 10: mod_base = OTHER; note = 2'-O-methyluridine-3'-phosphate
  modified_base 11: mod_base = OTHER; note = 2'-O-methyluridine-3'-phosphate
  modified_base 12: mod_base = OTHER; note = 2'-O-methylcytidine-3'-phosphate
  modified_base 13: mod_base = OTHER; note = 2'-O-methyladenosine-3'-phosphate
  modified_base 14: mod_base = OTHER; note = 2'-fluoroadenosine-3'-phosphate
  modified_base 15: mod_base = OTHER; note = 2'-O-methyladenosine-3'-phosphate
  modified_base 16: mod_base = OTHER; note = 2'-fluorocytidine-3'-phosphate
  modified_base 17: mod_base = OTHER; note = 2'-O-methylguanosine-3'-phosphate
  modified_base 18: mod_base = OTHER; note = 2'-O-methylcytidine-3'-phosphate
  modified_base 19: mod_base = OTHER; note = 2'-O-methylcytidine-3'-phosphate
  modified_base 20: mod_base = OTHER; note = 2'-O-methyluridine-3'-phosphate
  modified_base 21: mod_base = OTHER; note = 2'-O-methylguanosine-3'- phosphorothioate
  modified_base 22: mod_base = OTHER; note = 2'-O-methylcytidine-3'- phosphorothioate
  modified_base 23: mod_base = OTHER; note = 2'-O-methyladenosine-3'-phosphate
tacaactcattcaaacgcctgca

SEQ ID NO: 1277 - DNA, 23 bp, synthetic construct
  source 1..23: mol_type = other DNA
  modified_base 1: mod_base = OTHER; note = Vinyl-phosphonate 2'-O-methyluridine-3'-phosphorothioate
  modified_base 2: mod_base = OTHER; note = 2'-deoxyadenosine-3'-phosphorothioate
  modified_base 3: mod_base = OTHER; note = 2'-O-methylcytidine-3'-phosphate
  modified_base 4: mod_base = OTHER; note = 2'-O-methyladenosine-3'-phosphate
  modified_base 6: mod_base = OTHER; note = 2'-O-methylcytidine-3'-phosphate
  modified_base 8: mod_base = OTHER; note = 2'-O-methylcytidine-3'-phosphate
  modified_base 9: mod_base = OTHER; note = 2'-O-methyladenosine-3'-phosphate
  modified_base 10: mod_base = OTHER; note = 2'-O-methyluridine-3'-phosphate
  modified_base 11: mod_base = OTHER; note = 2'-O-methyluridine-3'-phosphate
  modified_base 13: mod_base = OTHER; note = 2'-O-methyladenosine-3'-phosphate
  modified_base 14: mod_base = OTHER; note = 2'-fluoroadenosine-3'-phosphate
  modified_base 15: mod_base = OTHER; note = 2'-O-methyladenosine-3'-phosphate
  modified_base 16: mod_base = OTHER; note = 2'-O-methylcytidine-3'-phosphate
  modified_base 17: mod_base = OTHER; note = 2'-O-methylguanosine-3'-phosphate
  modified_base 18: mod_base = OTHER; note = 2'-O-methylcytidine-3'-phosphate
  modified_base 19: mod_base = OTHER; note = 2'-O-methylcytidine-3'-phosphate
  modified_base 20: mod_base = OTHER; note = 2'-O-methyluridine-3'-phosphate
  modified_base 21: mod_base = OTHER; note = 2'-O-methylguanosine-3'- phosphorothioate
  modified_base 22: mod_base = OTHER; note = 2'-O-methylcytidine-3'- phosphorothioate
  modified_base 23: mod_base = OTHER; note = 2'-O-methyladenosine-3'-phosphate
  misc_feature 1: note = RNA
  misc_feature 2: note = DNA
  misc_feature 3..4: note = RNA
  misc_feature 5: note = DNA
  misc_feature 6: note = RNA
  misc_feature 7: note = DNA
  misc_feature 8..11: note = RNA
  misc_feature 12: note = DNA
  misc_feature 13..23: note = RNA
tacaactcattcaaacgcctgca

SEQ ID NO: 1278 - RNA, 23 nt, synthetic construct
  source 1..23: mol_type = other RNA
  modified_base 1: mod_base = OTHER; note = Vinyl-phosphonate 2'-O-methyluridine-3'-phosphorothioate
  modified_base 2: mod_base = OTHER; note = 2'-fluorocytidine-3'-phosphorothioate
  modified_base 3: mod_base = OTHER; note = 2'-O-methyladenosine-3'-phosphate
  modified_base 4: mod_base = OTHER; note = 2'-O-methylcytidine-3'-phosphate
  modified_base 5: mod_base = OTHER; note = 2'-O-methyladenosine-3'-phosphate
  modified_base 6: mod_base = OTHER; note = 2'-fluoroadenosine-3'-phosphate
  modified_base 7: mod_base = OTHER; note = 2'-O-methylcytidine-3'-phosphate
  modified_base 8: mod_base = OTHER; note = 2'-fluorouridine-3'-phosphate
  modified_base 9: mod_base = OTHER; note = 2'-fluorocytidine-3'-phosphate
  modified_base 10: mod_base = OTHER; note = 2'-O-methyladenosine-3'-phosphate
  modified_base 11: mod_base = OTHER; note = 2'-O-methyluridine-3'-phosphate
  modified_base 12: mod_base = OTHER; note = 2'-O-methyluridine-3'-phosphate
  modified_base 13: mod_base = OTHER; note = 2'-O-methylcytidine-3'-phosphate
  modified_base 14: mod_base = OTHER; note = 2'-fluoroadenosine-3'-phosphate
  modified_base 15: mod_base = OTHER; note = 2'-O-methyladenosine-3'-phosphate
  modified_base 16: mod_base = OTHER; note = 2'-fluoroadenosine-3'-phosphate
  modified_base 17: mod_base = OTHER; note = 2'-O-methylcytidine-3'-phosphate
  modified_base 18: mod_base = OTHER; note = 2'-O-methylguanosine-3'-phosphate
  modified_base 19: mod_base = OTHER; note = 2'-O-methylcytidine-3'-phosphate
  modified_base 20: mod_base = OTHER; note = 2'-O-methylcytidine-3'-phosphate
  modified_base 21: mod_base = OTHER; note = 2'-O-methyluridine-3'-phosphorothioate
  modified_base 22: mod_base = OTHER; note = 2'-O-methylguanosine-3'- phosphorothioate
  modified_base 23: mod_base = OTHER; note = 2'-O-methylcytidine-3'-phosphate
tcacaactcattcaaacgcctgc

SEQ ID NO: 1279 - DNA, 23 bp, synthetic construct
  source 1..23: mol_type = other DNA
  modified_base 1: mod_base = OTHER; note = Vinyl-phosphonate 2'-O-methyluridine-3'-phosphorothioate
  modified_base 2: mod_base = OTHER; note = 2'-deoxycytidine-3'-phosphorothioate
  modified_base 3: mod_base = OTHER; note = 2'-O-methyladenosine-3'-phosphate
  modified_base 4: mod_base = OTHER; note = 2'-O-methylcytidine-3'-phosphate
  modified_base 6: mod_base = OTHER; note = 2'-O-methyladenosine-3'-phosphate
  modified_base 8: mod_base = OTHER; note = 2'-O-methyluridine-3'-phosphate
  modified_base 9: mod_base = OTHER; note = 2'-O-methylcytidine-3'-phosphate
  modified_base 10: mod_base = OTHER; note = 2'-O-methyladenosine-3'-phosphate
  modified_base 11: mod_base = OTHER; note = 2'-O-methyluridine-3'-phosphate
  modified_base 13: mod_base = OTHER; note = 2'-O-methylcytidine-3'-phosphate
  modified_base 14: mod_base = OTHER; note = 2'-fluoroadenosine-3'-phosphate
  modified_base 15: mod_base = OTHER; note = 2'-O-methyladenosine-3'-phosphate
  modified_base 16: mod_base = OTHER; note = 2'-O-methyladenosine-3'-phosphate
  modified_base 17: mod_base = OTHER; note = 2'-O-methylcytidine-3'-phosphate
  modified_base 18: mod_base = OTHER; note = 2'-O-methylguanosine-3'-phosphate
  modified_base 19: mod_base = OTHER; note = 2'-O-methylcytidine-3'-phosphate
  modified_base 20: mod_base = OTHER; note = 2'-O-methylcytidine-3'-phosphate
  modified_base 21: mod_base = OTHER; note = 2'-O-methyluridine-3'-phosphorothioate
  modified_base 22: mod_base = OTHER; note = 2'-O-methylguanosine-3'- phosphorothioate
  modified_base 23: mod_base = OTHER; note = 2'-O-methylcytidine-3'-phosphate
  misc_feature 1: note = RNA
  misc_feature 2: note = DNA
  misc_feature 3..4: note = RNA
  misc_feature 5: note = DNA
  misc_feature 6: note = RNA
  misc_feature 7: note = DNA
  misc_feature 8..11: note = RNA
  misc_feature 12: note = DNA
  misc_feature 13..23: note = RNA
tcacaactcattcaaacgcctgc

SEQ ID NO: 1280 - RNA, 23 nt, synthetic construct
  source 1..23: mol_type = other RNA
  modified_base 1: mod_base = OTHER; note = Vinyl-phosphonate 2'-O-methyluridine-3'-phosphorothioate
  modified_base 2: mod_base = OTHER; note = 2'-fluoroadenosine-3'-phosphorothioate
  modified_base 3: mod_base = OTHER; note = 2'-O-methylcytidine-3'-phosphate
  modified_base 4: mod_base = OTHER; note = 2'-O-methylcytidine-3'-phosphate
  modified_base 5: mod_base = OTHER; note = 2'-O-methyladenosine-3'-phosphate
  modified_base 6: mod_base = OTHER; note = 2'-fluorocytidine-3'-phosphate
  modified_base 7: mod_base = OTHER; note = 2'-O-methyladenosine-3'-phosphate
  modified_base 8: mod_base = OTHER; note = 2'-fluoroadenosine-3'-phosphate
  modified_base 9: mod_base = OTHER; note = 2'-fluorocytidine-3'-phosphate
  modified_base 10: mod_base = OTHER; note = 2'-O-methyluridine-3'-phosphate
  modified_base 11: mod_base = OTHER; note = 2'-O-methylcytidine-3'-phosphate
  modified_base 12: mod_base = OTHER; note = 2'-O-methyladenosine-3'-phosphate
  modified_base 13: mod_base = OTHER; note = 2'-O-methyluridine-3'-phosphate
  modified_base 14: mod_base = OTHER; note = 2'-fluorouridine-3'-phosphate
  modified_base 15: mod_base = OTHER; note = 2'-O-methylcytidine-3'-phosphate
  modified_base 16: mod_base = OTHER; note = 2'-fluoroadenosine-3'-phosphate
  modified_base 17: mod_base = OTHER; note = 2'-O-methyladenosine-3'-phosphate
  modified_base 18: mod_base = OTHER; note = 2'-O-methyladenosine-3'-phosphate
  modified_base 19: mod_base = OTHER; note = 2'-O-methylcytidine-3'-phosphate
  modified_base 20: mod_base = OTHER; note = 2'-O-methylguanosine-3'-phosphate
  modified_base 21: mod_base = OTHER; note = 2'-O-methylcytidine-3'- phosphorothioate
  modified_base 22: mod_base = OTHER; note = 2'-O-methylcytidine-3'- phosphorothioate
  modified_base 23: mod_base = OTHER; note = 2'-O-methyluridine-3'-phosphate
taccacaactcattcaaacgcct

SEQ ID NO: 1281 - DNA, 23 bp, synthetic construct
  source 1..23: mol_type = other DNA
  modified_base 1: mod_base = OTHER; note = Vinyl-phosphonate 2'-O-methyluridine-3'-phosphorothioate
  modified_base 2: mod_base = OTHER; note = 2'-deoxyadenosine-3'-phosphorothioate
  modified_base 3: mod_base = OTHER; note = 2'-O-methylcytidine-3'-phosphate
  modified_base 4: mod_base = OTHER; note = 2'-O-methylcytidine-3'-phosphate
  modified_base 6: mod_base = OTHER; note = 2'-O-methylcytidine-3'-phosphate
  modified_base 8: mod_base = OTHER; note = 2'-O-methyladenosine-3'-phosphate
  modified_base 9: mod_base = OTHER; note = 2'-O-methylcytidine-3'-phosphate
  modified_base 10: mod_base = OTHER; note = 2'-O-methyluridine-3'-phosphate
  modified_base 11: mod_base = OTHER; note = 2'-O-methylcytidine-3'-phosphate
  modified_base 13: mod_base = OTHER; note = 2'-O-methyluridine-3'-phosphate
  modified_base 14: mod_base = OTHER; note = 2'-fluorouridine-3'-phosphate
  modified_base 15: mod_base = OTHER; note = 2'-O-methylcytidine-3'-phosphate
  modified_base 16: mod_base = OTHER; note = 2'-O-methyladenosine-3'-phosphate
  modified_base 17: mod_base = OTHER; note = 2'-O-methyladenosine-3'-phosphate
  modified_base 18: mod_base = OTHER; note = 2'-O-methyladenosine-3'-phosphate
  modified_base 19: mod_base = OTHER; note = 2'-O-methylcytidine-3'-phosphate
  modified_base 20: mod_base = OTHER; note = 2'-O-methylguanosine-3'-phosphate
  modified_base 21: mod_base = OTHER; note = 2'-O-methylcytidine-3'- phosphorothioate
  modified_base 22: mod_base = OTHER; note = 2'-O-methylcytidine-3'- phosphorothioate
  modified_base 23: mod_base = OTHER; note = 2'-O-methyluridine-3'-phosphate
  misc_feature 1: note = RNA
  misc_feature 2: note = DNA
  misc_feature 3..4: note = RNA
  misc_feature 5: note = DNA
  misc_feature 6: note = RNA
  misc_feature 7: note = DNA
  misc_feature 8..11: note = RNA
  misc_feature 12: note = DNA
  misc_feature 13..23: note = RNA
taccacaactcattcaaacgcct

SEQ ID NO: 1282 - RNA, 23 nt, synthetic construct
  source 1..23: mol_type = other RNA
  modified_base 1: mod_base = OTHER; note = Vinyl-phosphonate 2'-O-methyluridine-3'-phosphorothioate
  modified_base 2: mod_base = OTHER; note = 2'-fluorocytidine-3'-phosphorothioate
  modified_base 3: mod_base = OTHER; note = 2'-O-methyladenosine-3'-phosphate
  modified_base 4: mod_base = OTHER; note = 2'-O-methyladenosine-3'-phosphate
  modified_base 5: mod_base = OTHER; note = 2'-O-methylcytidine-3'-phosphate
  modified_base 6: mod_base = OTHER; note = 2'-fluorocytidine-3'-phosphate
  modified_base 7: mod_base = OTHER; note = 2'-O-methyladenosine-3'-phosphate
  modified_base 8: mod_base = OTHER; note = 2'-fluorocytidine-3'-phosphate
  modified_base 9: mod_base = OTHER; note = 2'-fluoroadenosine-3'-phosphate
  modified_base 10: mod_base = OTHER; note = 2'-O-methyladenosine-3'-phosphate
  modified_base 11: mod_base = OTHER; note = 2'-O-methylcytidine-3'-phosphate
  modified_base 12: mod_base = OTHER; note = 2'-O-methyluridine-3'-phosphate
  modified_base 13: mod_base = OTHER; note = 2'-O-methylcytidine-3'-phosphate
  modified_base 14: mod_base = OTHER; note = 2'-fluoroadenosine-3'-phosphate
  modified_base 15: mod_base = OTHER; note = 2'-O-methyluridine-3'-phosphate
  modified_base 16: mod_base = OTHER; note = 2'-fluorouridine-3'-phosphate
  modified_base 17: mod_base = OTHER; note = 2'-O-methylcytidine-3'-phosphate
  modified_base 18: mod_base = OTHER; note = 2'-O-methyladenosine-3'-phosphate
  modified_base 19: mod_base = OTHER; note = 2'-O-methyladenosine-3'-phosphate
  modified_base 20: mod_base = OTHER; note = 2'-O-methyladenosine-3'-phosphate
  modified_base 21: mod_base = OTHER; note = 2'-O-methylcytidine-3'- phosphorothioate
  modified_base 22: mod_base = OTHER; note = 2'-O-methylguanosine-3'- phosphorothioate
  modified_base 23: mod_base = OTHER; note = 2'-O-methylcytidine-3'-phosphate
tcaaccacaactcattcaaacgc

SEQ ID NO: 1283 - DNA, 23 bp, synthetic construct
  source 1..23: mol_type = other DNA
  modified_base 1: mod_base = OTHER; note = Vinyl-phosphonate 2'-O-methyluridine-3'-phosphorothioate
  modified_base 2: mod_base = OTHER; note = 2'-deoxycytidine-3'-phosphorothioate
  modified_base 3: mod_base = OTHER; note = 2'-O-methyladenosine-3'-phosphate
  modified_base 4: mod_base = OTHER; note = 2'-O-methyladenosine-3'-phosphate
  modified_base 6: mod_base = OTHER; note = 2'-O-methylcytidine-3'-phosphate
  modified_base 8: mod_base = OTHER; note = 2'-O-methylcytidine-3'-phosphate
  modified_base 9: mod_base = OTHER; note = 2'-O-methyladenosine-3'-phosphate
  modified_base 10: mod_base = OTHER; note = 2'-O-methyladenosine-3'-phosphate
  modified_base 11: mod_base = OTHER; note = 2'-O-methylcytidine-3'-phosphate
  modified_base 13: mod_base = OTHER; note = 2'-O-methylcytidine-3'-phosphate
  modified_base 14: mod_base = OTHER; note = 2'-fluoroadenosine-3'-phosphate
  modified_base 15: mod_base = OTHER; note = 2'-O-methyluridine-3'-phosphate
  modified_base 16: mod_base = OTHER; note = 2'-O-methyluridine-3'-phosphate
  modified_base 17: mod_base = OTHER; note = 2'-O-methylcytidine-3'-phosphate
  modified_base 18: mod_base = OTHER; note = 2'-O-methyladenosine-3'-phosphate
  modified_base 19: mod_base = OTHER; note = 2'-O-methyladenosine-3'-phosphate
  modified_base 20: mod_base = OTHER; note = 2'-O-methyladenosine-3'-phosphate
  modified_base 21: mod_base = OTHER; note = 2'-O-methylcytidine-3'- phosphorothioate
  modified_base 22: mod_base = OTHER; note = 2'-O-methylguanosine-3'- phosphorothioate
  modified_base 23: mod_base = OTHER; note = 2'-O-methylcytidine-3'-phosphate
  misc_feature 1: note = RNA
  misc_feature 2: note = DNA
  misc_feature 3..4: note = RNA
  misc_feature 5: note = DNA
  misc_feature 6: note = RNA
  misc_feature 7: note = DNA
  misc_feature 8..11: note = RNA
  misc_feature 12: note = DNA
  misc_feature 13..23: note = RNA
tcaaccacaactcattcaaacgc

SEQ ID NO: 1284 - RNA, 23 nt, synthetic construct
  source 1..23: mol_type = other RNA
  modified_base 1: mod_base = OTHER; note = Vinyl-phosphonate 2'-O-methyluridine-3'-phosphorothioate
  modified_base 2: mod_base = OTHER; note = 2'-fluoroguanosine-3'-phosphorothioate
  modified_base 3: mod_base = OTHER; note = 2'-O-methylcytidine-3'-phosphate
  modified_base 4: mod_base = OTHER; note = 2'-O-methyladenosine-3'-phosphate
  modified_base 5: mod_base = OTHER; note = 2'-O-methyladenosine-3'-phosphate
  modified_base 6: mod_base = OTHER; note = 2'-fluorocytidine-3'-phosphate
  modified_base 7: mod_base = OTHER; note = 2'-O-methylcytidine-3'-phosphate
  modified_base 8: mod_base = OTHER; note = 2'-fluoroadenosine-3'-phosphate
  modified_base 9: mod_base = OTHER; note = 2'-fluorocytidine-3'-phosphate
  modified_base 10: mod_base = OTHER; note = 2'-O-methyladenosine-3'-phosphate
  modified_base 11: mod_base = OTHER; note = 2'-O-methyladenosine-3'-phosphate
  modified_base 12: mod_base = OTHER; note = 2'-O-methylcytidine-3'-phosphate
  modified_base 13: mod_base = OTHER; note = 2'-O-methyluridine-3'-phosphate
  modified_base 14: mod_base = OTHER; note = 2'-fluorocytidine-3'-phosphate
  modified_base 15: mod_base = OTHER; note = 2'-O-methyladenosine-3'-phosphate
  modified_base 16: mod_base = OTHER; note = 2'-fluorouridine-3'-phosphate
  modified_base 17: mod_base = OTHER; note = 2'-O-methyluridine-3'-phosphate
  modified_base 18: mod_base = OTHER; note = 2'-O-methylcytidine-3'-phosphate
  modified_base 19: mod_base = OTHER; note = 2'-O-methyladenosine-3'-phosphate
  modified_base 20: mod_base = OTHER; note = 2'-O-methyladenosine-3'-phosphate
  modified_base 21: mod_base = OTHER; note = 2'-O-methyladenosine-3'- phosphorothioate
  modified_base 22: mod_base = OTHER; note = 2'-O-methylcytidine-3'- phosphorothioate
  modified_base 23: mod_base = OTHER; note = 2'-O-methylguanosine-3'-phosphate
tgcaaccacaactcattcaaacg

SEQ ID NO: 1285 - DNA, 23 bp, synthetic construct
  source 1..23: mol_type = other DNA
  modified_base 1: mod_base = OTHER; note = Vinyl-phosphonate 2'-O-methyluridine-3'-phosphorothioate
  modified_base 2: mod_base = OTHER; note = 2'-deoxyguanosine-3'-phosphorothioate
  modified_base 3: mod_base = OTHER; note = 2'-O-methylcytidine-3'-phosphate
  modified_base 4: mod_base = OTHER; note = 2'-O-methyladenosine-3'-phosphate
  modified_base 6: mod_base = OTHER; note = 2'-O-methylcytidine-3'-phosphate
  modified_base 8: mod_base = OTHER; note = 2'-O-methyladenosine-3'-phosphate
  modified_base 9: mod_base = OTHER; note = 2'-O-methylcytidine-3'-phosphate
  modified_base 10: mod_base = OTHER; note = 2'-O-methyladenosine-3'-phosphate
  modified_base 11: mod_base = OTHER; note = 2'-O-methyladenosine-3'-phosphate
  modified_base 13: mod_base = OTHER; note = 2'-O-methyluridine-3'-phosphate
  modified_base 14: mod_base = OTHER; note = 2'-fluorocytidine-3'-phosphate
  modified_base 15: mod_base = OTHER; note = 2'-O-methyladenosine-3'-phosphate
  modified_base 16: mod_base = OTHER; note = 2'-O-methyluridine-3'-phosphate
  modified_base 17: mod_base = OTHER; note = 2'-O-methyluridine-3'-phosphate
  modified_base 18: mod_base = OTHER; note = 2'-O-methylcytidine-3'-phosphate
  modified_base 19: mod_base = OTHER; note = 2'-O-methyladenosine-3'-phosphate
  modified_base 20: mod_base = OTHER; note = 2'-O-methyladenosine-3'-phosphate
  modified_base 21: mod_base = OTHER; note = 2'-O-methyladenosine-3'- phosphorothioate
  modified_base 22: mod_base = OTHER; note = 2'-O-methylcytidine-3'- phosphorothioate
  modified_base 23: mod_base = OTHER; note = 2'-O-methylguanosine-3'-phosphate
  misc_feature 1: note = RNA
  misc_feature 2: note = DNA
  misc_feature 3..4: note = RNA
  misc_feature 5: note = DNA
  misc_feature 6: note = RNA
  misc_feature 7: note = DNA
  misc_feature 8..11: note = RNA
  misc_feature 12: note = DNA
  misc_feature 13..23: note = RNA
tgcaaccacaactcattcaaacg

SEQ ID NO: 1286 - RNA, 23 nt, synthetic construct
  source 1..23: mol_type = other RNA
  modified_base 1: mod_base = OTHER; note = Vinyl-phosphonate 2'-O-methyluridine-3'-phosphorothioate
  modified_base 2: mod_base = OTHER; note = 2'-fluoroguanosine-3'-phosphorothioate
  modified_base 3: mod_base = OTHER; note = 2'-O-methylguanosine-3'-phosphate
  modified_base 4: mod_base = OTHER; note = 2'-O-methylcytidine-3'-phosphate
  modified_base 5: mod_base = OTHER; note = 2'-O-methyladenosine-3'-phosphate
  modified_base 6: mod_base = OTHER; note = 2'-fluoroadenosine-3'-phosphate
  modified_base 7: mod_base = OTHER; note = 2'-O-methylcytidine-3'-phosphate
  modified_base 8: mod_base = OTHER; note = 2'-fluorocytidine-3'-phosphate
  modified_base 9: mod_base = OTHER; note = 2'-fluoroadenosine-3'-phosphate
  modified_base 10: mod_base = OTHER; note = 2'-O-methylcytidine-3'-phosphate
  modified_base 11: mod_base = OTHER; note = 2'-O-methyladenosine-3'-phosphate
  modified_base 12: mod_base = OTHER; note = 2'-O-methyladenosine-3'-phosphate
  modified_base 13: mod_base = OTHER; note = 2'-O-methylcytidine-3'-phosphate
  modified_base 14: mod_base = OTHER; note = 2'-fluorouridine-3'-phosphate
  modified_base 15: mod_base = OTHER; note = 2'-O-methylcytidine-3'-phosphate
  modified_base 16: mod_base = OTHER; note = 2'-fluoroadenosine-3'-phosphate
  modified_base 17: mod_base = OTHER; note = 2'-O-methyluridine-3'-phosphate
  modified_base 18: mod_base = OTHER; note = 2'-O-methyluridine-3'-phosphate
  modified_base 19: mod_base = OTHER; note = 2'-O-methylcytidine-3'-phosphate
  modified_base 20: mod_base = OTHER; note = 2'-O-methyladenosine-3'-phosphate
  modified_base 21: mod_base = OTHER; note = 2'-O-methyladenosine-3'- phosphorothioate
  modified_base 22: mod_base = OTHER; note = 2'-O-methyladenosine-3'- phosphorothioate
  modified_base 23: mod_base = OTHER; note = 2'-O-methylcytidine-3'-phosphate
tggcaaccacaactcattcaaac

SEQ ID NO: 1287 - DNA, 23 bp, synthetic construct
  source 1..23: mol_type = other DNA
  modified_base 1: mod_base = OTHER; note = Vinyl-phosphonate 2'-O-methyluridine-3'-phosphorothioate
  modified_base 2: mod_base = OTHER; note = 2'-deoxyguanosine-3'-phosphorothioate
  modified_base 3: mod_base = OTHER; note = 2'-O-methylguanosine-3'-phosphate
  modified_base 4: mod_base = OTHER; note = 2'-O-methylcytidine-3'-phosphate
  modified_base 6: mod_base = OTHER; note = 2'-O-methyladenosine-3'-phosphate
  modified_base 8: mod_base = OTHER; note = 2'-O-methylcytidine-3'-phosphate
  modified_base 9: mod_base = OTHER; note = 2'-O-methyladenosine-3'-phosphate
  modified_base 10: mod_base = OTHER; note = 2'-O-methylcytidine-3'-phosphate
  modified_base 11: mod_base = OTHER; note = 2'-O-methyladenosine-3'-phosphate
  modified_base 13: mod_base = OTHER; note = 2'-O-methylcytidine-3'-phosphate
  modified_base 14: mod_base = OTHER; note = 2'-fluorouridine-3'-phosphate
  modified_base 15: mod_base = OTHER; note = 2'-O-methylcytidine-3'-phosphate
  modified_base 16: mod_base = OTHER; note = 2'-O-methyladenosine-3'-phosphate
  modified_base 17: mod_base = OTHER; note = 2'-O-methyluridine-3'-phosphate
  modified_base 18: mod_base = OTHER; note = 2'-O-methyluridine-3'-phosphate
  modified_base 19: mod_base = OTHER; note = 2'-O-methylcytidine-3'-phosphate
  modified_base 20: mod_base = OTHER; note = 2'-O-methyladenosine-3'-phosphate
  modified_base 21: mod_base = OTHER; note = 2'-O-methyladenosine-3'- phosphorothioate
  modified_base 22: mod_base = OTHER; note = 2'-O-methyladenosine-3'- phosphorothioate
  modified_base 23: mod_base = OTHER; note = 2'-O-methylcytidine-3'-phosphate
  misc_feature 1: note = RNA
  misc_feature 2: note = DNA
  misc_feature 3..4: note = RNA
  misc_feature 5: note = DNA
  misc_feature 6: note = RNA
  misc_feature 7: note = DNA
  misc_feature 8..11: note = RNA
  misc_feature 12: note = DNA
  misc_feature 13..23: note = RNA
tggcaaccacaactcattcaaac

SEQ ID NO: 1288 - DNA, 23 bp, synthetic construct
  source 1..23: mol_type = other DNA
  modified_base 1: mod_base = OTHER; note = Vinyl-phosphonate 2'-O-methyluridine-3'-phosphorothioate
  modified_base 2: mod_base = OTHER; note = 2'-fluorouridine -3'-phosphorothioate
  modified_base 3: mod_base = OTHER; note = 2'-O-methylguanosine-3'-phosphate
  modified_base 4: mod_base = OTHER; note = 2'-O-methylguanosine-3'-phosphate
  modified_base 6: mod_base = OTHER; note = 2'-O-methyladenosine-3'-phosphate
  modified_base 7: mod_base = OTHER; note = Adenosine-glycol nucleic acid (GNA) S-Isomer
  modified_base 8: mod_base = OTHER; note = 2'-O-methylcytidine-3'-phosphate
  modified_base 9: mod_base = OTHER; note = 2'-O-methylcytidine-3'-phosphate
  modified_base 10: mod_base = OTHER; note = 2'-O-methyladenosine-3'-phosphate
  modified_base 11: mod_base = OTHER; note = 2'-O-methylcytidine-3'-phosphate
  modified_base 12: mod_base = OTHER; note = 2'-O-methyladenosine-3'-phosphate
  modified_base 13: mod_base = OTHER; note = 2'-O-methyladenosine-3'-phosphate
  modified_base 14: mod_base = OTHER; note = 2'-fluorocytidine-3'-phosphate
  modified_base 15: mod_base = OTHER; note = 2'-O-methyluridine-3'-phosphate
  modified_base 16: mod_base = OTHER; note = 2'-fluorocytidine-3'-phosphate
  modified_base 17: mod_base = OTHER; note = 2'-O-methyladenosine-3'-phosphate
  modified_base 18: mod_base = OTHER; note = 2'-O-methyluridine-3'-phosphate
  modified_base 19: mod_base = OTHER; note = 2'-O-methyluridine-3'-phosphate
  modified_base 20: mod_base = OTHER; note = 2'-O-methylcytidine-3'-phosphate
  modified_base 21: mod_base = OTHER; note = 2'-O-methyladenosine-3'- phosphorothioate
  modified_base 22: mod_base = OTHER; note = 2'-O-methyladenosine-3'- phosphorothioate
  modified_base 23: mod_base = OTHER; note = 2'-O-methyladenosine-3'-phosphate
  misc_feature 1..4: note = RNA
  misc_feature 5: note = DNA
  misc_feature 6..23: note = RNA
ttggcaaccacaactcattcaaa

SEQ ID NO: 1289 - DNA, 23 bp, synthetic construct
  source 1..23: mol_type = other DNA
  modified_base 1: mod_base = OTHER; note = Vinyl-phosphonate 2'-O-methyluridine-3'-phosphorothioate
  modified_base 2: mod_base = OTHER; note = 2'-fluorouridine -3'-phosphorothioate
  modified_base 3: mod_base = OTHER; note = 2'-O-methyluridine-3'-phosphate
  modified_base 4: mod_base = OTHER; note = 2'-O-methyladenosine-3'-phosphate
  modified_base 6: mod_base = OTHER; note = 2'-O-methyluridine-3'-phosphate
  modified_base 7: mod_base = OTHER; note = Thymidine-glycol nucleic acid (GNA) S-Isomer
  modified_base 8: mod_base = OTHER; note = 2'-O-methylguanosine-3'-phosphate
  modified_base 9: mod_base = OTHER; note = 2'-O-methylguanosine-3'-phosphate
  modified_base 10: mod_base = OTHER; note = 2'-O-methylcytidine-3'-phosphate
  modified_base 11: mod_base = OTHER; note = 2'-O-methyladenosine-3'-phosphate
  modified_base 12: mod_base = OTHER; note = 2'-O-methyladenosine-3'-phosphate
  modified_base 13: mod_base = OTHER; note = 2'-O-methylcytidine-3'-phosphate
  modified_base 14: mod_base = OTHER; note = 2'-fluorocytidine-3'-phosphate
  modified_base 15: mod_base = OTHER; note = 2'-O-methyladenosine-3'-phosphate
  modified_base 16: mod_base = OTHER; note = 2'-fluorocytidine-3'-phosphate
  modified_base 17: mod_base = OTHER; note = 2'-O-methyladenosine-3'-phosphate
  modified_base 18: mod_base = OTHER; note = 2'-O-methyladenosine-3'-phosphate
  modified_base 19: mod_base = OTHER; note = 2'-O-methylcytidine-3'-phosphate
  modified_base 20: mod_base = OTHER; note = 2'-O-methyluridine-3'-phosphate
  modified_base 21: mod_base = OTHER; note = 2'-O-methylcytidine-3'- phosphorothioate
  modified_base 22: mod_base = OTHER; note = 2'-O-methyladenosine-3'- phosphorothioate
  modified_base 23: mod_base = OTHER; note = 2'-O-methyluridine-3'-phosphate
  misc_feature 1..4: note = RNA
  misc_feature 5: note = DNA
  misc_feature 6: note = RNA
  misc_feature 7: note = DNA
  misc_feature 8..23: note = RNA
tttacttggcaaccacaactcat

SEQ ID NO: 1290 - DNA, 23 bp, synthetic construct
  source 1..23: mol_type = other DNA
  modified_base 1: mod_base = OTHER; note = Vinyl-phosphonate 2'-O-methyluridine-3'-phosphorothioate
  modified_base 2: mod_base = OTHER; note = 2'-fluorouridine -3'-phosphorothioate
  modified_base 3: mod_base = OTHER; note = 2'-O-methyluridine-3'-phosphate
  modified_base 4: mod_base = OTHER; note = 2'-O-methyluridine-3'-phosphate
  modified_base 6: mod_base = OTHER; note = 2'-O-methylcytidine-3'-phosphate
  modified_base 7: mod_base = OTHER; note = Thymidine-glycol nucleic acid (GNA) S-Isomer
  modified_base 8: mod_base = OTHER; note = 2'-O-methyluridine-3'-phosphate
  modified_base 9: mod_base = OTHER; note = 2'-O-methylguanosine-3'-phosphate
  modified_base 10: mod_base = OTHER; note = 2'-O-methylguanosine-3'-phosphate
  modified_base 11: mod_base = OTHER; note = 2'-O-methylcytidine-3'-phosphate
  modified_base 12: mod_base = OTHER; note = 2'-O-methyladenosine-3'-phosphate
  modified_base 13: mod_base = OTHER; note = 2'-O-methyladenosine-3'-phosphate
  modified_base 14: mod_base = OTHER; note = 2'-fluorocytidine-3'-phosphate
  modified_base 15: mod_base = OTHER; note = 2'-O-methylcytidine-3'-phosphate
  modified_base 16: mod_base = OTHER; note = 2'-fluoroadenosine-3'-phosphate
  modified_base 17: mod_base = OTHER; note = 2'-O-methylcytidine-3'-phosphate
  modified_base 18: mod_base = OTHER; note = 2'-O-methyladenosine-3'-phosphate
  modified_base 19: mod_base = OTHER; note = 2'-O-methyladenosine-3'-phosphate
  modified_base 20: mod_base = OTHER; note = 2'-O-methylcytidine-3'-phosphate
  modified_base 21: mod_base = OTHER; note = 2'-O-methyluridine-3'-phosphorothioate
  modified_base 22: mod_base = OTHER; note = 2'-O-methylcytidine-3'- phosphorothioate
  modified_base 23: mod_base = OTHER; note = 2'-O-methyladenosine-3'-phosphate
  misc_feature 1..4: note = RNA
  misc_feature 5: note = DNA
  misc_feature 6: note = RNA
  misc_feature 7: note = DNA
  misc_feature 8..23: note = RNA
ttttacttggcaaccacaactca

SEQ ID NO: 1291 - RNA, 23 nt, synthetic construct
  source 1..23: mol_type = other RNA
  modified_base 1: mod_base = OTHER; note = Vinyl-phosphonate 2'-O-methyluridine-3'-phosphorothioate
  modified_base 2: mod_base = OTHER; note = 2'-fluorocytidine-3'-phosphorothioate
  modified_base 3: mod_base = OTHER; note = 2'-O-methyluridine-3'-phosphate
  modified_base 4: mod_base = OTHER; note = 2'-O-methyluridine-3'-phosphate
  modified_base 5: mod_base = OTHER; note = 2'-O-methyluridine-3'-phosphate
  modified_base 6: mod_base = OTHER; note = 2'-fluoroadenosine-3'-phosphate
  modified_base 7: mod_base = OTHER; note = 2'-O-methylcytidine-3'-phosphate
  modified_base 8: mod_base = OTHER; note = 2'-fluorouridine-3'-phosphate
  modified_base 9: mod_base = OTHER; note = 2'-fluorouridine-3'-phosphate
  modified_base 10: mod_base = OTHER; note = 2'-O-methylguanosine-3'-phosphate
  modified_base 11: mod_base = OTHER; note = 2'-O-methylguanosine-3'-phosphate
  modified_base 12: mod_base = OTHER; note = 2'-O-methylcytidine-3'-phosphate
  modified_base 13: mod_base = OTHER; note = 2'-O-methyladenosine-3'-phosphate
  modified_base 14: mod_base = OTHER; note = 2'-fluoroadenosine-3'-phosphate
  modified_base 15: mod_base = OTHER; note = 2'-O-methylcytidine-3'-phosphate
  modified_base 16: mod_base = OTHER; note = 2'-fluorocytidine-3'-phosphate
  modified_base 17: mod_base = OTHER; note = 2'-O-methyladenosine-3'-phosphate
  modified_base 18: mod_base = OTHER; note = 2'-O-methylcytidine-3'-phosphate
  modified_base 19: mod_base = OTHER; note = 2'-O-methyladenosine-3'-phosphate
  modified_base 20: mod_base = OTHER; note = 2'-O-methyladenosine-3'-phosphate
  modified_base 21: mod_base = OTHER; note = 2'-O-methylcytidine-3'- phosphorothioate
  modified_base 22: mod_base = OTHER; note = 2'-O-methyluridine-3'-phosphorothioate
  modified_base 23: mod_base = OTHER; note = 2'-O-methylcytidine-3'-phosphate
tctttacttggcaaccacaactc

SEQ ID NO: 1292 - DNA, 23 bp, synthetic construct
  source 1..23: mol_type = other DNA
  modified_base 1: mod_base = OTHER; note = Vinyl-phosphonate 2'-O-methyluridine-3'-phosphorothioate
  modified_base 2: mod_base = OTHER; note = 2'-deoxycytidine-3'-phosphorothioate
  modified_base 3: mod_base = OTHER; note = 2'-O-methyluridine-3'-phosphate
  modified_base 4: mod_base = OTHER; note = 2'-O-methyluridine-3'-phosphate
  modified_base 6: mod_base = OTHER; note = 2'-O-methyladenosine-3'-phosphate
  modified_base 8: mod_base = OTHER; note = 2'-O-methyluridine-3'-phosphate
  modified_base 9: mod_base = OTHER; note = 2'-O-methyluridine-3'-phosphate
  modified_base 10: mod_base = OTHER; note = 2'-O-methylguanosine-3'-phosphate
  modified_base 11: mod_base = OTHER; note = 2'-O-methylguanosine-3'-phosphate
  modified_base 13: mod_base = OTHER; note = 2'-O-methyladenosine-3'-phosphate
  modified_base 14: mod_base = OTHER; note = 2'-fluoroadenosine-3'-phosphate
  modified_base 15: mod_base = OTHER; note = 2'-O-methylcytidine-3'-phosphate
  modified_base 16: mod_base = OTHER; note = 2'-O-methylcytidine-3'-phosphate
  modified_base 17: mod_base = OTHER; note = 2'-O-methyladenosine-3'-phosphate
  modified_base 18: mod_base = OTHER; note = 2'-O-methylcytidine-3'-phosphate
  modified_base 19: mod_base = OTHER; note = 2'-O-methyladenosine-3'-phosphate
  modified_base 20: mod_base = OTHER; note = 2'-O-methyladenosine-3'-phosphate
  modified_base 21: mod_base = OTHER; note = 2'-O-methylcytidine-3'- phosphorothioate
  modified_base 22: mod_base = OTHER; note = 2'-O-methyluridine-3'-phosphorothioate
  modified_base 23: mod_base = OTHER; note = 2'-O-methylcytidine-3'-phosphate
  misc_feature 1: note = RNA
  misc_feature 2: note = DNA
  misc_feature 3..4: note = RNA
  misc_feature 5: note = DNA
  misc_feature 6: note = RNA
  misc_feature 7: note = DNA
  misc_feature 8..11: note = RNA
  misc_feature 12: note = DNA
  misc_feature 13..23: note = RNA
tctttacttggcaaccacaactc

SEQ ID NO: 1293 - RNA, 23 nt, synthetic construct
  source 1..23: mol_type = other RNA
  modified_base 1: mod_base = OTHER; note = Vinyl-phosphonate 2'-O-methyluridine-3'-phosphorothioate
  modified_base 2: mod_base = OTHER; note = 2'-fluoroadenosine-3'-phosphorothioate
  modified_base 3: mod_base = OTHER; note = 2'-O-methylcytidine-3'-phosphate
  modified_base 4: mod_base = OTHER; note = 2'-O-methyluridine-3'-phosphate
  modified_base 5: mod_base = OTHER; note = 2'-O-methyluridine-3'-phosphate
  modified_base 6: mod_base = OTHER; note = 2'-fluorouridine-3'-phosphate
  modified_base 7: mod_base = OTHER; note = 2'-O-methyladenosine-3'-phosphate
  modified_base 8: mod_base = OTHER; note = 2'-fluorocytidine-3'-phosphate
  modified_base 9: mod_base = OTHER; note = 2'-fluorouridine-3'-phosphate
  modified_base 10: mod_base = OTHER; note = 2'-O-methyluridine-3'-phosphate
  modified_base 11: mod_base = OTHER; note = 2'-O-methylguanosine-3'-phosphate
  modified_base 12: mod_base = OTHER; note = 2'-O-methylguanosine-3'-phosphate
  modified_base 13: mod_base = OTHER; note = 2'-O-methylcytidine-3'-phosphate
  modified_base 14: mod_base = OTHER; note = 2'-fluoroadenosine-3'-phosphate
  modified_base 15: mod_base = OTHER; note = 2'-O-methyladenosine-3'-phosphate
  modified_base 16: mod_base = OTHER; note = 2'-fluorocytidine-3'-phosphate
  modified_base 17: mod_base = OTHER; note = 2'-O-methylcytidine-3'-phosphate
  modified_base 18: mod_base = OTHER; note = 2'-O-methyladenosine-3'-phosphate
  modified_base 19: mod_base = OTHER; note = 2'-O-methylcytidine-3'-phosphate
  modified_base 20: mod_base = OTHER; note = 2'-O-methyladenosine-3'-phosphate
  modified_base 21: mod_base = OTHER; note = 2'-O-methyladenosine-3'- phosphorothioate
  modified_base 22: mod_base = OTHER; note = 2'-O-methylcytidine-3'- phosphorothioate
  modified_base 23: mod_base = OTHER; note = 2'-O-methyluridine-3'-phosphate
tactttacttggcaaccacaact

SEQ ID NO: 1294 - DNA, 23 bp, synthetic construct
  source 1..23: mol_type = other DNA
  modified_base 1: mod_base = OTHER; note = Vinyl-phosphonate 2'-O-methyluridine-3'-phosphorothioate
  modified_base 2: mod_base = OTHER; note = 2'-deoxyadenosine-3'-phosphorothioate
  modified_base 3: mod_base = OTHER; note = 2'-O-methylcytidine-3'-phosphate
  modified_base 4: mod_base = OTHER; note = 2'-O-methyluridine-3'-phosphate
  modified_base 6: mod_base = OTHER; note = 2'-O-methyluridine-3'-phosphate
  modified_base 8: mod_base = OTHER; note = 2'-O-methylcytidine-3'-phosphate
  modified_base 9: mod_base = OTHER; note = 2'-O-methyluridine-3'-phosphate
  modified_base 10: mod_base = OTHER; note = 2'-O-methyluridine-3'-phosphate
  modified_base 11: mod_base = OTHER; note = 2'-O-methylguanosine-3'-phosphate
  modified_base 13: mod_base = OTHER; note = 2'-O-methylcytidine-3'-phosphate
  modified_base 14: mod_base = OTHER; note = 2'-fluoroadenosine-3'-phosphate
  modified_base 15: mod_base = OTHER; note = 2'-O-methyladenosine-3'-phosphate
  modified_base 16: mod_base = OTHER; note = 2'-O-methylcytidine-3'-phosphate
  modified_base 17: mod_base = OTHER; note = 2'-O-methylcytidine-3'-phosphate
  modified_base 18: mod_base = OTHER; note = 2'-O-methyladenosine-3'-phosphate
  modified_base 19: mod_base = OTHER; note = 2'-O-methylcytidine-3'-phosphate
  modified_base 20: mod_base = OTHER; note = 2'-O-methyladenosine-3'-phosphate
  modified_base 21: mod_base = OTHER; note = 2'-O-methyladenosine-3'- phosphorothioate
  modified_base 22: mod_base = OTHER; note = 2'-O-methylcytidine-3'- phosphorothioate
  modified_base 23: mod_base = OTHER; note = 2'-O-methyluridine-3'-phosphate
  misc_feature 1: note = RNA
  misc_feature 2: note = DNA
  misc_feature 3..4: note = RNA
  misc_feature 5: note = DNA
  misc_feature 6: note = RNA
  misc_feature 7: note = DNA
  misc_feature 8..11: note = RNA
  misc_feature 12: note = DNA
  misc_feature 13..23: note = RNA
tactttacttggcaaccacaact

SEQ ID NO: 1295 - DNA, 23 bp, synthetic construct
  source 1..23: mol_type = other DNA
  modified_base 1: mod_base = OTHER; note = Vinyl-phosphonate 2'-O-methyluridine-3'-phosphorothioate
  modified_base 2: mod_base = OTHER; note = 2'-fluoroadenosine-3'-phosphorothioate
  modified_base 3: mod_base = OTHER; note = 2'-O-methylcytidine-3'-phosphate
  modified_base 4: mod_base = OTHER; note = 2'-O-methylcytidine-3'-phosphate
  modified_base 6: mod_base = OTHER; note = 2'-O-methylcytidine-3'-phosphate
  modified_base 7: mod_base = OTHER; note = Thymidine-glycol nucleic acid (GNA) S-Isomer
  modified_base 8: mod_base = OTHER; note = 2'-O-methyluridine-3'-phosphate
  modified_base 9: mod_base = OTHER; note = 2'-O-methyluridine-3'-phosphate
  modified_base 10: mod_base = OTHER; note = 2'-O-methyladenosine-3'-phosphate
  modified_base 11: mod_base = OTHER; note = 2'-O-methylcytidine-3'-phosphate
  modified_base 12: mod_base = OTHER; note = 2'-O-methyluridine-3'-phosphate
  modified_base 13: mod_base = OTHER; note = 2'-O-methyluridine-3'-phosphate
  modified_base 14: mod_base = OTHER; note = 2'-fluoroguanosine-3'-phosphate
  modified_base 15: mod_base = OTHER; note = 2'-O-methylguanosine-3'-phosphate
  modified_base 16: mod_base = OTHER; note = 2'-fluorocytidine-3'-phosphate
  modified_base 17: mod_base = OTHER; note = 2'-O-methyladenosine-3'-phosphate
  modified_base 18: mod_base = OTHER; note = 2'-O-methyladenosine-3'-phosphate
  modified_base 19: mod_base = OTHER; note = 2'-O-methylcytidine-3'-phosphate
  modified_base 20: mod_base = OTHER; note = 2'-O-methylcytidine-3'-phosphate
  modified_base 21: mod_base = OTHER; note = 2'-O-methyladenosine-3'- phosphorothioate
  modified_base 22: mod_base = OTHER; note = 2'-O-methylcytidine-3'- phosphorothioate
  modified_base 23: mod_base = OTHER; note = 2'-O-methyladenosine-3'-phosphate
  misc_feature 1..4: note = RNA
  misc_feature 5: note = DNA
  misc_feature 6: note = RNA
  misc_feature 7: note = DNA
  misc_feature 8..23: note = RNA
taccactttacttggcaaccaca

SEQ ID NO: 1296 - RNA, 23 nt, synthetic construct
  source 1..23: mol_type = other RNA
  modified_base 1: mod_base = OTHER; note = Vinyl-phosphonate 2'-O-methyluridine-3'-phosphorothioate
  modified_base 2: mod_base = OTHER; note = 2'-fluoroadenosine-3'-phosphorothioate
  modified_base 3: mod_base = OTHER; note = 2'-O-methylcytidine-3'-phosphate
  modified_base 4: mod_base = OTHER; note = 2'-O-methylcytidine-3'-phosphate
  modified_base 5: mod_base = OTHER; note = 2'-O-methyladenosine-3'-phosphate
  modified_base 6: mod_base = OTHER; note = 2'-fluorocytidine-3'-phosphate
  modified_base 7: mod_base = OTHER; note = 2'-O-methyluridine-3'-phosphate
  modified_base 8: mod_base = OTHER; note = 2'-fluorouridine-3'-phosphate
  modified_base 9: mod_base = OTHER; note = 2'-fluorouridine-3'-phosphate
  modified_base 10: mod_base = OTHER; note = 2'-O-methyladenosine-3'-phosphate
  modified_base 11: mod_base = OTHER; note = 2'-O-methylcytidine-3'-phosphate
  modified_base 12: mod_base = OTHER; note = 2'-O-methyluridine-3'-phosphate
  modified_base 13: mod_base = OTHER; note = 2'-O-methyluridine-3'-phosphate
  modified_base 14: mod_base = OTHER; note = 2'-fluoroguanosine-3'-phosphate
  modified_base 15: mod_base = OTHER; note = 2'-O-methylguanosine-3'-phosphate
  modified_base 16: mod_base = OTHER; note = 2'-fluorocytidine-3'-phosphate
  modified_base 17: mod_base = OTHER; note = 2'-O-methyladenosine-3'-phosphate
  modified_base 18: mod_base = OTHER; note = 2'-O-methyladenosine-3'-phosphate
  modified_base 19: mod_base = OTHER; note = 2'-O-methylcytidine-3'-phosphate
  modified_base 20: mod_base = OTHER; note = 2'-O-methylcytidine-3'-phosphate
  modified_base 21: mod_base = OTHER; note = 2'-O-methyladenosine-3'- phosphorothioate
  modified_base 22: mod_base = OTHER; note = 2'-O-methylcytidine-3'- phosphorothioate
  modified_base 23: mod_base = OTHER; note = 2'-O-methyladenosine-3'-phosphate
taccactttacttggcaaccaca

SEQ ID NO: 1297 - DNA, 23 bp, synthetic construct
  source 1..23: mol_type = other DNA
  modified_base 1: mod_base = OTHER; note = Vinyl-phosphonate 2'-O-methyluridine-3'-phosphorothioate
  modified_base 2: mod_base = OTHER; note = 2'-deoxyadenosine-3'-phosphorothioate
  modified_base 3: mod_base = OTHER; note = 2'-O-methylcytidine-3'-phosphate
  modified_base 4: mod_base = OTHER; note = 2'-O-methylcytidine-3'-phosphate
  modified_base 6: mod_base = OTHER; note = 2'-O-methylcytidine-3'-phosphate
  modified_base 8: mod_base = OTHER; note = 2'-O-methyluridine-3'-phosphate
  modified_base 9: mod_base = OTHER; note = 2'-O-methyluridine-3'-phosphate
  modified_base 10: mod_base = OTHER; note = 2'-O-methyladenosine-3'-phosphate
  modified_base 11: mod_base = OTHER; note = 2'-O-methylcytidine-3'-phosphate
  modified_base 13: mod_base = OTHER; note = 2'-O-methyluridine-3'-phosphate
  modified_base 14: mod_base = OTHER; note = 2'-fluoroguanosine-3'-phosphate
  modified_base 15: mod_base = OTHER; note = 2'-O-methylguanosine-3'-phosphate
  modified_base 16: mod_base = OTHER; note = 2'-O-methylcytidine-3'-phosphate
  modified_base 17: mod_base = OTHER; note = 2'-O-methyladenosine-3'-phosphate
  modified_base 18: mod_base = OTHER; note = 2'-O-methyladenosine-3'-phosphate
  modified_base 19: mod_base = OTHER; note = 2'-O-methylcytidine-3'-phosphate
  modified_base 20: mod_base = OTHER; note = 2'-O-methylcytidine-3'-phosphate
  modified_base 21: mod_base = OTHER; note = 2'-O-methyladenosine-3'- phosphorothioate
  modified_base 22: mod_base = OTHER; note = 2'-O-methylcytidine-3'- phosphorothioate
  modified_base 23: mod_base = OTHER; note = 2'-O-methyladenosine-3'-phosphate
  misc_feature 1: note = RNA
  misc_feature 2: note = DNA
  misc_feature 3..4: note = RNA
  misc_feature 5: note = DNA
  misc_feature 6: note = RNA
  misc_feature 7: note = DNA
  misc_feature 8..11: note = RNA
  misc_feature 12: note = DNA
  misc_feature 13..23: note = RNA
taccactttacttggcaaccaca

SEQ ID NO: 1298 - RNA, 23 nt, synthetic construct
  source 1..23: mol_type = other RNA
  modified_base 1: mod_base = OTHER; note = Vinyl-phosphonate 2'-O-methyluridine-3'-phosphorothioate
  modified_base 2: mod_base = OTHER; note = 2'-fluorocytidine-3'-phosphorothioate
  modified_base 3: mod_base = OTHER; note = 2'-O-methyladenosine-3'-phosphate
  modified_base 4: mod_base = OTHER; note = 2'-O-methylcytidine-3'-phosphate
  modified_base 5: mod_base = OTHER; note = 2'-O-methylcytidine-3'-phosphate
  modified_base 6: mod_base = OTHER; note = 2'-fluoroadenosine-3'-phosphate
  modified_base 7: mod_base = OTHER; note = 2'-O-methylcytidine-3'-phosphate
  modified_base 8: mod_base = OTHER; note = 2'-fluorouridine-3'-phosphate
  modified_base 9: mod_base = OTHER; note = 2'-fluorouridine-3'-phosphate
  modified_base 10: mod_base = OTHER; note = 2'-O-methyluridine-3'-phosphate
  modified_base 11: mod_base = OTHER; note = 2'-O-methyladenosine-3'-phosphate
  modified_base 12: mod_base = OTHER; note = 2'-O-methylcytidine-3'-phosphate
  modified_base 13: mod_base = OTHER; note = 2'-O-methyluridine-3'-phosphate
  modified_base 14: mod_base = OTHER; note = 2'-fluorouridine-3'-phosphate
  modified_base 15: mod_base = OTHER; note = 2'-O-methylguanosine-3'-phosphate
  modified_base 16: mod_base = OTHER; note = 2'-fluoroguanosine-3'-phosphate
  modified_base 17: mod_base = OTHER; note = 2'-O-methylcytidine-3'-phosphate
  modified_base 18: mod_base = OTHER; note = 2'-O-methyladenosine-3'-phosphate
  modified_base 19: mod_base = OTHER; note = 2'-O-methyladenosine-3'-phosphate
  modified_base 20: mod_base = OTHER; note = 2'-O-methylcytidine-3'-phosphate
  modified_base 21: mod_base = OTHER; note = 2'-O-methylcytidine-3'- phosphorothioate
  modified_base 22: mod_base = OTHER; note = 2'-O-methyladenosine-3'- phosphorothioate
  modified_base 23: mod_base = OTHER; note = 2'-O-methylcytidine-3'-phosphate
tcaccactttacttggcaaccac

SEQ ID NO: 1299 - DNA, 23 bp, synthetic construct
  source 1..23: mol_type = other DNA
  modified_base 1: mod_base = OTHER; note = Vinyl-phosphonate 2'-O-methyluridine-3'-phosphorothioate
  modified_base 2: mod_base = OTHER; note = 2'-deoxycytidine-3'-phosphorothioate
  modified_base 3: mod_base = OTHER; note = 2'-O-methyladenosine-3'-phosphate
  modified_base 4: mod_base = OTHER; note = 2'-O-methylcytidine-3'-phosphate
  modified_base 6: mod_base = OTHER; note = 2'-O-methyladenosine-3'-phosphate
  modified_base 8: mod_base = OTHER; note = 2'-O-methyluridine-3'-phosphate
  modified_base 9: mod_base = OTHER; note = 2'-O-methyluridine-3'-phosphate
  modified_base 10: mod_base = OTHER; note = 2'-O-methyluridine-3'-phosphate
  modified_base 11: mod_base = OTHER; note = 2'-O-methyladenosine-3'-phosphate
  modified_base 13: mod_base = OTHER; note = 2'-O-methyluridine-3'-phosphate
  modified_base 14: mod_base = OTHER; note = 2'-fluorouridine-3'-phosphate
  modified_base 15: mod_base = OTHER; note = 2'-O-methylguanosine-3'-phosphate
  modified_base 16: mod_base = OTHER; note = 2'-O-methylguanosine-3'-phosphate
  modified_base 17: mod_base = OTHER; note = 2'-O-methylcytidine-3'-phosphate
  modified_base 18: mod_base = OTHER; note = 2'-O-methyladenosine-3'-phosphate
  modified_base 19: mod_base = OTHER; note = 2'-O-methyladenosine-3'-phosphate
  modified_base 20: mod_base = OTHER; note = 2'-O-methylcytidine-3'-phosphate
  modified_base 21: mod_base = OTHER; note = 2'-O-methylcytidine-3'- phosphorothioate
  modified_base 22: mod_base = OTHER; note = 2'-O-methyladenosine-3'- phosphorothioate
  modified_base 23: mod_base = OTHER; note = 2'-O-methylcytidine-3'-phosphate
  misc_feature 1: note = RNA
  misc_feature 2: note = DNA
  misc_feature 3..4: note = RNA
  misc_feature 5: note = DNA
  misc_feature 6: note = RNA
  misc_feature 7: note = DNA
  misc_feature 8..11: note = RNA
  misc_feature 12: note = DNA
  misc_feature 13..23: note = RNA
tcaccactttacttggcaaccac

SEQ ID NO: 1300 - DNA, 23 bp, synthetic construct
  source 1..23: mol_type = other DNA
  modified_base 1: mod_base = OTHER; note = Vinyl-phosphonate 2'-O-methyluridine-3'-phosphorothioate
  modified_base 2: mod_base = OTHER; note = 2'-fluoroadenosine-3'-phosphorothioate
  modified_base 3: mod_base = OTHER; note = 2'-O-methylguanosine-3'-phosphate
  modified_base 4: mod_base = OTHER; note = 2'-O-methyluridine-3'-phosphate
  modified_base 6: mod_base = OTHER; note = 2'-O-methylcytidine-3'-phosphate
  modified_base 7: mod_base = OTHER; note = Adenosine-glycol nucleic acid (GNA) S-Isomer
  modified_base 8: mod_base = OTHER; note = 2'-O-methylcytidine-3'-phosphate
  modified_base 9: mod_base = OTHER; note = 2'-O-methylcytidine-3'-phosphate
  modified_base 10: mod_base = OTHER; note = 2'-O-methyladenosine-3'-phosphate
  modified_base 11: mod_base = OTHER; note = 2'-O-methylcytidine-3'-phosphate
  modified_base 12: mod_base = OTHER; note = 2'-O-methyluridine-3'-phosphate
  modified_base 13: mod_base = OTHER; note = 2'-O-methyluridine-3'-phosphate
  modified_base 14: mod_base = OTHER; note = 2'-fluorouridine-3'-phosphate
  modified_base 15: mod_base = OTHER; note = 2'-O-methyladenosine-3'-phosphate
  modified_base 16: mod_base = OTHER; note = 2'-fluorocytidine-3'-phosphate
  modified_base 17: mod_base = OTHER; note = 2'-O-methyluridine-3'-phosphate
  modified_base 18: mod_base = OTHER; note = 2'-O-methyluridine-3'-phosphate
  modified_base 19: mod_base = OTHER; note = 2'-O-methylguanosine-3'-phosphate
  modified_base 20: mod_base = OTHER; note = 2'-O-methylguanosine-3'-phosphate
  modified_base 21: mod_base = OTHER; note = 2'-O-methylcytidine-3'- phosphorothioate
  modified_base 22: mod_base = OTHER; note = 2'-O-methyladenosine-3'- phosphorothioate
  modified_base 23: mod_base = OTHER; note = 2'-O-methyladenosine-3'-phosphate
  misc_feature 1..4: note = RNA
  misc_feature 5: note = DNA
  misc_feature 6..23: note = RNA
tagttcaccactttacttggcaa

SEQ ID NO: 1301 - DNA, 23 bp, synthetic construct
  source 1..23: mol_type = other DNA
  modified_base 1: mod_base = OTHER; note = Vinyl-phosphonate 2'-O-methyluridine-3'-phosphorothioate
  modified_base 2: mod_base = OTHER; note = 2'-fluorouridine -3'-phosphorothioate
  modified_base 3: mod_base = OTHER; note = 2'-O-methyladenosine-3'-phosphate
  modified_base 4: mod_base = OTHER; note = 2'-O-methyladenosine-3'-phosphate
  modified_base 6: mod_base = OTHER; note = 2'-O-methyluridine-3'-phosphate
  modified_base 7: mod_base = OTHER; note = Thymidine-glycol nucleic acid (GNA) S-Isomer
  modified_base 8: mod_base = OTHER; note = 2'-O-methylcytidine-3'-phosphate
  modified_base 9: mod_base = OTHER; note = 2'-O-methyladenosine-3'-phosphate
  modified_base 10: mod_base = OTHER; note = 2'-O-methylcytidine-3'-phosphate
  modified_base 11: mod_base = OTHER; note = 2'-O-methylcytidine-3'-phosphate
  modified_base 12: mod_base = OTHER; note = 2'-O-methyladenosine-3'-phosphate
  modified_base 13: mod_base = OTHER; note = 2'-O-methylcytidine-3'-phosphate
  modified_base 14: mod_base = OTHER; note = 2'-fluorouridine-3'-phosphate
  modified_base 15: mod_base = OTHER; note = 2'-O-methyluridine-3'-phosphate
  modified_base 16: mod_base = OTHER; note = 2'-fluorouridine-3'-phosphate
  modified_base 17: mod_base = OTHER; note = 2'-O-methyladenosine-3'-phosphate
  modified_base 18: mod_base = OTHER; note = 2'-O-methylcytidine-3'-phosphate
  modified_base 19: mod_base = OTHER; note = 2'-O-methyluridine-3'-phosphate
  modified_base 20: mod_base = OTHER; note = 2'-O-methyluridine-3'-phosphate
  modified_base 21: mod_base = OTHER; note = 2'-O-methylguanosine-3'- phosphorothioate
  modified_base 22: mod_base = OTHER; note = 2'-O-methylguanosine-3'- phosphorothioate
  modified_base 23: mod_base = OTHER; note = 2'-O-methylcytidine-3'-phosphate
  misc_feature 1..4: note = RNA
  misc_feature 5: note = DNA
  misc_feature 6: note = RNA
  misc_feature 7: note = DNA
  misc_feature 8..23: note = RNA
ttaagttcaccactttacttggc

SEQ ID NO: 1302 - DNA, 23 bp, synthetic construct
  source 1..23: mol_type = other DNA
  modified_base 1: mod_base = OTHER; note = Vinyl-phosphonate 2'-O-methyluridine-3'-phosphorothioate
  modified_base 2: mod_base = OTHER; note = 2'-fluoroguanosine-3'-phosphorothioate
  modified_base 3: mod_base = OTHER; note = 2'-O-methyluridine-3'-phosphate
  modified_base 4: mod_base = OTHER; note = 2'-O-methyladenosine-3'-phosphate
  modified_base 6: mod_base = OTHER; note = 2'-O-methylguanosine-3'-phosphate
  modified_base 7: mod_base = OTHER; note = Thymidine-glycol nucleic acid (GNA) S-Isomer
  modified_base 8: mod_base = OTHER; note = 2'-O-methyluridine-3'-phosphate
  modified_base 9: mod_base = OTHER; note = 2'-O-methylcytidine-3'-phosphate
  modified_base 10: mod_base = OTHER; note = 2'-O-methyladenosine-3'-phosphate
  modified_base 11: mod_base = OTHER; note = 2'-O-methylcytidine-3'-phosphate
  modified_base 12: mod_base = OTHER; note = 2'-O-methylcytidine-3'-phosphate
  modified_base 13: mod_base = OTHER; note = 2'-O-methyladenosine-3'-phosphate
  modified_base 14: mod_base = OTHER; note = 2'-fluorocytidine-3'-phosphate
  modified_base 15: mod_base = OTHER; note = 2'-O-methyluridine-3'-phosphate
  modified_base 16: mod_base = OTHER; note = 2'-fluorouridine-3'-phosphate
  modified_base 17: mod_base = OTHER; note = 2'-O-methyluridine-3'-phosphate
  modified_base 18: mod_base = OTHER; note = 2'-O-methyladenosine-3'-phosphate
  modified_base 19: mod_base = OTHER; note = 2'-O-methylcytidine-3'-phosphate
  modified_base 20: mod_base = OTHER; note = 2'-O-methyluridine-3'-phosphate
  modified_base 21: mod_base = OTHER; note = 2'-O-methyluridine-3'-phosphorothioate
  modified_base 22: mod_base = OTHER; note = 2'-O-methylguanosine-3'- phosphorothioate
  modified_base 23: mod_base = OTHER; note = 2'-O-methylguanosine-3'-phosphate
  misc_feature 1..4: note = RNA
  misc_feature 5: note = DNA
  misc_feature 6: note = RNA
  misc_feature 7: note = DNA
  misc_feature 8..23: note = RNA
tgtaagttcaccactttacttgg

SEQ ID NO: 1303 - RNA, 23 nt, synthetic construct
  source 1..23: mol_type = other RNA
  modified_base 1: mod_base = OTHER; note = Vinyl-phosphonate 2'-O-methyluridine-3'-phosphorothioate
  modified_base 2: mod_base = OTHER; note = 2'-fluorocytidine-3'-phosphorothioate
  modified_base 3: mod_base = OTHER; note = 2'-O-methylguanosine-3'-phosphate
  modified_base 4: mod_base = OTHER; note = 2'-O-methyluridine-3'-phosphate
  modified_base 5: mod_base = OTHER; note = 2'-O-methyladenosine-3'-phosphate
  modified_base 6: mod_base = OTHER; note = 2'-fluoroadenosine-3'-phosphate
  modified_base 7: mod_base = OTHER; note = 2'-O-methylguanosine-3'-phosphate
  modified_base 8: mod_base = OTHER; note = 2'-fluorouridine-3'-phosphate
  modified_base 9: mod_base = OTHER; note = 2'-fluorouridine-3'-phosphate
  modified_base 10: mod_base = OTHER; note = 2'-O-methylcytidine-3'-phosphate
  modified_base 11: mod_base = OTHER; note = 2'-O-methyladenosine-3'-phosphate
  modified_base 12: mod_base = OTHER; note = 2'-O-methylcytidine-3'-phosphate
  modified_base 13: mod_base = OTHER; note = 2'-O-methylcytidine-3'-phosphate
  modified_base 14: mod_base = OTHER; note = 2'-fluoroadenosine-3'-phosphate
  modified_base 15: mod_base = OTHER; note = 2'-O-methylcytidine-3'-phosphate
  modified_base 16: mod_base = OTHER; note = 2'-fluorouridine-3'-phosphate
  modified_base 17: mod_base = OTHER; note = 2'-O-methyluridine-3'-phosphate
  modified_base 18: mod_base = OTHER; note = 2'-O-methyluridine-3'-phosphate
  modified_base 19: mod_base = OTHER; note = 2'-O-methyladenosine-3'-phosphate
  modified_base 20: mod_base = OTHER; note = 2'-O-methylcytidine-3'-phosphate
  modified_base 21: mod_base = OTHER; note = 2'-O-methyluridine-3'-phosphorothioate
  modified_base 22: mod_base = OTHER; note = 2'-O-methyluridine-3'-phosphorothioate
  modified_base 23: mod_base = OTHER; note = 2'-O-methylguanosine-3'-phosphate
tcgtaagttcaccactttacttg

SEQ ID NO: 1304 - DNA, 23 bp, synthetic construct
  source 1..23: mol_type = other DNA
  modified_base 1: mod_base = OTHER; note = Vinyl-phosphonate 2'-O-methyluridine-3'-phosphorothioate
  modified_base 2: mod_base = OTHER; note = 2'-deoxycytidine-3'-phosphorothioate
  modified_base 3: mod_base = OTHER; note = 2'-O-methylguanosine-3'-phosphate
  modified_base 4: mod_base = OTHER; note = 2'-O-methyluridine-3'-phosphate
  modified_base 6: mod_base = OTHER; note = 2'-O-methyladenosine-3'-phosphate
  modified_base 8: mod_base = OTHER; note = 2'-O-methyluridine-3'-phosphate
  modified_base 9: mod_base = OTHER; note = 2'-O-methyluridine-3'-phosphate
  modified_base 10: mod_base = OTHER; note = 2'-O-methylcytidine-3'-phosphate
  modified_base 11: mod_base = OTHER; note = 2'-O-methyladenosine-3'-phosphate
  modified_base 13: mod_base = OTHER; note = 2'-O-methylcytidine-3'-phosphate
  modified_base 14: mod_base = OTHER; note = 2'-fluoroadenosine-3'-phosphate
  modified_base 15: mod_base = OTHER; note = 2'-O-methylcytidine-3'-phosphate
  modified_base 16: mod_base = OTHER; note = 2'-O-methyluridine-3'-phosphate
  modified_base 17: mod_base = OTHER; note = 2'-O-methyluridine-3'-phosphate
  modified_base 18: mod_base = OTHER; note = 2'-O-methyluridine-3'-phosphate
  modified_base 19: mod_base = OTHER; note = 2'-O-methyladenosine-3'-phosphate
  modified_base 20: mod_base = OTHER; note = 2'-O-methylcytidine-3'-phosphate
  modified_base 21: mod_base = OTHER; note = 2'-O-methyluridine-3'-phosphorothioate
  modified_base 22: mod_base = OTHER; note = 2'-O-methyluridine-3'-phosphorothioate
  modified_base 23: mod_base = OTHER; note = 2'-O-methylguanosine-3'-phosphate
  misc_feature 1: note = RNA
  misc_feature 2: note = DNA
  misc_feature 3..4: note = RNA
  misc_feature 5: note = DNA
  misc_feature 6: note = RNA
  misc_feature 7: note = DNA
  misc_feature 8..11: note = RNA
  misc_feature 12: note = DNA
  misc_feature 13..23: note = RNA
tcgtaagttcaccactttacttg

SEQ ID NO: 1305 - RNA, 23 nt, synthetic construct
  source 1..23: mol_type = other RNA
  modified_base 1: mod_base = OTHER; note = Vinyl-phosphonate 2'-O-methyluridine-3'-phosphorothioate
  modified_base 2: mod_base = OTHER; note = 2'-fluoroadenosine-3'-phosphorothioate
  modified_base 3: mod_base = OTHER; note = 2'-O-methylcytidine-3'-phosphate
  modified_base 4: mod_base = OTHER; note = 2'-O-methylguanosine-3'-phosphate
  modified_base 5: mod_base = OTHER; note = 2'-O-methyluridine-3'-phosphate
  modified_base 6: mod_base = OTHER; note = 2'-fluoroadenosine-3'-phosphate
  modified_base 7: mod_base = OTHER; note = 2'-O-methyladenosine-3'-phosphate
  modified_base 8: mod_base = OTHER; note = 2'-fluoroguanosine-3'-phosphate
  modified_base 9: mod_base = OTHER; note = 2'-fluorouridine-3'-phosphate
  modified_base 10: mod_base = OTHER; note = 2'-O-methyluridine-3'-phosphate
  modified_base 11: mod_base = OTHER; note = 2'-O-methylcytidine-3'-phosphate
  modified_base 12: mod_base = OTHER; note = 2'-O-methyladenosine-3'-phosphate
  modified_base 13: mod_base = OTHER; note = 2'-O-methylcytidine-3'-phosphate
  modified_base 14: mod_base = OTHER; note = 2'-fluorocytidine-3'-phosphate
  modified_base 15: mod_base = OTHER; note = 2'-O-methyladenosine-3'-phosphate
  modified_base 16: mod_base = OTHER; note = 2'-fluorocytidine-3'-phosphate
  modified_base 17: mod_base = OTHER; note = 2'-O-methyluridine-3'-phosphate
  modified_base 18: mod_base = OTHER; note = 2'-O-methyluridine-3'-phosphate
  modified_base 19: mod_base = OTHER; note = 2'-O-methyluridine-3'-phosphate
  modified_base 20: mod_base = OTHER; note = 2'-O-methyladenosine-3'-phosphate
  modified_base 21: mod_base = OTHER; note = 2'-O-methylcytidine-3'- phosphorothioate
  modified_base 22: mod_base = OTHER; note = 2'-O-methyluridine-3'-phosphorothioate
  modified_base 23: mod_base = OTHER; note = 2'-O-methyluridine-3'-phosphate
tacgtaagttcaccactttactt

SEQ ID NO: 1306 - DNA, 23 bp, synthetic construct
  source 1..23: mol_type = other DNA
  modified_base 1: mod_base = OTHER; note = Vinyl-phosphonate 2'-O-methyluridine-3'-phosphorothioate
  modified_base 2: mod_base = OTHER; note = 2'-deoxyadenosine-3'-phosphorothioate
  modified_base 3: mod_base = OTHER; note = 2'-O-methylcytidine-3'-phosphate
  modified_base 4: mod_base = OTHER; note = 2'-O-methylguanosine-3'-phosphate
  modified_base 6: mod_base = OTHER; note = 2'-O-methyladenosine-3'-phosphate
  modified_base 8: mod_base = OTHER; note = 2'-O-methylguanosine-3'-phosphate
  modified_base 9: mod_base = OTHER; note = 2'-O-methyluridine-3'-phosphate
  modified_base 10: mod_base = OTHER; note = 2'-O-methyluridine-3'-phosphate
  modified_base 11: mod_base = OTHER; note = 2'-O-methylcytidine-3'-phosphate
  modified_base 13: mod_base = OTHER; note = 2'-O-methylcytidine-3'-phosphate
  modified_base 14: mod_base = OTHER; note = 2'-fluorocytidine-3'-phosphate
  modified_base 15: mod_base = OTHER; note = 2'-O-methyladenosine-3'-phosphate
  modified_base 16: mod_base = OTHER; note = 2'-O-methylcytidine-3'-phosphate
  modified_base 17: mod_base = OTHER; note = 2'-O-methyluridine-3'-phosphate
  modified_base 18: mod_base = OTHER; note = 2'-O-methyluridine-3'-phosphate
  modified_base 19: mod_base = OTHER; note = 2'-O-methyluridine-3'-phosphate
  modified_base 20: mod_base = OTHER; note = 2'-O-methyladenosine-3'-phosphate
  modified_base 21: mod_base = OTHER; note = 2'-O-methylcytidine-3'- phosphorothioate
  modified_base 22: mod_base = OTHER; note = 2'-O-methyluridine-3'-phosphorothioate
  modified_base 23: mod_base = OTHER; note = 2'-O-methyluridine-3'-phosphate
  misc_feature 1: note = RNA
  misc_feature 2: note = DNA
  misc_feature 3..4: note = RNA
  misc_feature 5: note = DNA
  misc_feature 6: note = RNA
  misc_feature 7: note = DNA
  misc_feature 8..11: note = RNA
  misc_feature 12: note = DNA
  misc_feature 13..23: note = RNA
tacgtaagttcaccactttactt

SEQ ID NO: 1307 - RNA, 23 nt, synthetic construct
  source 1..23: mol_type = other RNA
  modified_base 1: mod_base = OTHER; note = Vinyl-phosphonate 2'-O-methyluridine-3'-phosphorothioate
  modified_base 2: mod_base = OTHER; note = 2'-fluorocytidine-3'-phosphorothioate
  modified_base 3: mod_base = OTHER; note = 2'-O-methyladenosine-3'-phosphate
  modified_base 4: mod_base = OTHER; note = 2'-O-methylcytidine-3'-phosphate
  modified_base 5: mod_base = OTHER; note = 2'-O-methylguanosine-3'-phosphate
  modified_base 6: mod_base = OTHER; note = 2'-fluorouridine-3'-phosphate
  modified_base 7: mod_base = OTHER; note = 2'-O-methyladenosine-3'-phosphate
  modified_base 8: mod_base = OTHER; note = 2'-fluoroadenosine-3'-phosphate
  modified_base 9: mod_base = OTHER; note = 2'-fluoroguanosine-3'-phosphate
  modified_base 10: mod_base = OTHER; note = 2'-O-methyluridine-3'-phosphate
  modified_base 11: mod_base = OTHER; note = 2'-O-methyluridine-3'-phosphate
  modified_base 12: mod_base = OTHER; note = 2'-O-methylcytidine-3'-phosphate
  modified_base 13: mod_base = OTHER; note = 2'-O-methyladenosine-3'-phosphate
  modified_base 14: mod_base = OTHER; note = 2'-fluorocytidine-3'-phosphate
  modified_base 15: mod_base = OTHER; note = 2'-O-methylcytidine-3'-phosphate
  modified_base 16: mod_base = OTHER; note = 2'-fluoroadenosine-3'-phosphate
  modified_base 17: mod_base = OTHER; note = 2'-O-methylcytidine-3'-phosphate
  modified_base 18: mod_base = OTHER; note = 2'-O-methyluridine-3'-phosphate
  modified_base 19: mod_base = OTHER; note = 2'-O-methyluridine-3'-phosphate
  modified_base 20: mod_base = OTHER; note = 2'-O-methyluridine-3'-phosphate
  modified_base 21: mod_base = OTHER; note = 2'-O-methyladenosine-3'- phosphorothioate
  modified_base 22: mod_base = OTHER; note = 2'-O-methylcytidine-3'- phosphorothioate
  modified_base 23: mod_base = OTHER; note = 2'-O-methyluridine-3'-phosphate
tcacgtaagttcaccactttact

SEQ ID NO: 1308 - DNA, 23 bp, synthetic construct
  source 1..23: mol_type = other DNA
  modified_base 1: mod_base = OTHER; note = Vinyl-phosphonate 2'-O-methyluridine-3'-phosphorothioate
  modified_base 2: mod_base = OTHER; note = 2'-deoxycytidine-3'-phosphorothioate
  modified_base 3: mod_base = OTHER; note = 2'-O-methyladenosine-3'-phosphate
  modified_base 4: mod_base = OTHER; note = 2'-O-methylcytidine-3'-phosphate
  modified_base 6: mod_base = OTHER; note = 2'-O-methyluridine-3'-phosphate
  modified_base 8: mod_base = OTHER; note = 2'-O-methyladenosine-3'-phosphate
  modified_base 9: mod_base = OTHER; note = 2'-O-methylguanosine-3'-phosphate
  modified_base 10: mod_base = OTHER; note = 2'-O-methyluridine-3'-phosphate
  modified_base 11: mod_base = OTHER; note = 2'-O-methyluridine-3'-phosphate
  modified_base 13: mod_base = OTHER; note = 2'-O-methyladenosine-3'-phosphate
  modified_base 14: mod_base = OTHER; note = 2'-fluorocytidine-3'-phosphate
  modified_base 15: mod_base = OTHER; note = 2'-O-methylcytidine-3'-phosphate
  modified_base 16: mod_base = OTHER; note = 2'-O-methyladenosine-3'-phosphate
  modified_base 17: mod_base = OTHER; note = 2'-O-methylcytidine-3'-phosphate
  modified_base 18: mod_base = OTHER; note = 2'-O-methyluridine-3'-phosphate
  modified_base 19: mod_base = OTHER; note = 2'-O-methyluridine-3'-phosphate
  modified_base 20: mod_base = OTHER; note = 2'-O-methyluridine-3'-phosphate
  modified_base 21: mod_base = OTHER; note = 2'-O-methyladenosine-3'- phosphorothioate
  modified_base 22: mod_base = OTHER; note = 2'-O-methylcytidine-3'- phosphorothioate
  modified_base 23: mod_base = OTHER; note = 2'-O-methyluridine-3'-phosphate
  misc_feature 1: note = RNA
  misc_feature 2: note = DNA
  misc_feature 3..4: note = RNA
  misc_feature 5: note = DNA
  misc_feature 6: note = RNA
  misc_feature 7: note = DNA
  misc_feature 8..11: note = RNA
  misc_feature 12: note = DNA
  misc_feature 13..23: note = RNA
tcacgtaagttcaccactttact

SEQ ID NO: 1309 - RNA, 23 nt, synthetic construct
  source 1..23: mol_type = other RNA
  modified_base 1: mod_base = OTHER; note = Vinyl-phosphonate 2'-O-methyluridine-3'-phosphorothioate
  modified_base 2: mod_base = OTHER; note = 2'-fluorocytidine-3'-phosphorothioate
  modified_base 3: mod_base = OTHER; note = 2'-O-methylcytidine-3'-phosphate
  modified_base 4: mod_base = OTHER; note = 2'-O-methyladenosine-3'-phosphate
  modified_base 5: mod_base = OTHER; note = 2'-O-methylcytidine-3'-phosphate
  modified_base 6: mod_base = OTHER; note = 2'-fluoroguanosine-3'-phosphate
  modified_base 7: mod_base = OTHER; note = 2'-O-methyluridine-3'-phosphate
  modified_base 8: mod_base = OTHER; note = 2'-fluoroadenosine-3'-phosphate
  modified_base 9: mod_base = OTHER; note = 2'-fluoroadenosine-3'-phosphate
  modified_base 10: mod_base = OTHER; note = 2'-O-methylguanosine-3'-phosphate
  modified_base 11: mod_base = OTHER; note = 2'-O-methyluridine-3'-phosphate
  modified_base 12: mod_base = OTHER; note = 2'-O-methyluridine-3'-phosphate
  modified_base 13: mod_base = OTHER; note = 2'-O-methylcytidine-3'-phosphate
  modified_base 14: mod_base = OTHER; note = 2'-fluoroadenosine-3'-phosphate
  modified_base 15: mod_base = OTHER; note = 2'-O-methylcytidine-3'-phosphate
  modified_base 16: mod_base = OTHER; note = 2'-fluorocytidine-3'-phosphate
  modified_base 17: mod_base = OTHER; note = 2'-O-methyladenosine-3'-phosphate
  modified_base 18: mod_base = OTHER; note = 2'-O-methylcytidine-3'-phosphate
  modified_base 19: mod_base = OTHER; note = 2'-O-methyluridine-3'-phosphate
  modified_base 20: mod_base = OTHER; note = 2'-O-methyluridine-3'-phosphate
  modified_base 21: mod_base = OTHER; note = 2'-O-methyluridine-3'-phosphorothioate
  modified_base 22: mod_base = OTHER; note = 2'-O-methyladenosine-3'- phosphorothioate
  modified_base 23: mod_base = OTHER; note = 2'-O-methylcytidine-3'-phosphate
tccacgtaagttcaccactttac

SEQ ID NO: 1310 - DNA, 23 bp, synthetic construct
  source 1..23: mol_type = other DNA
  modified_base 1: mod_base = OTHER; note = Vinyl-phosphonate 2'-O-methyluridine-3'-phosphorothioate
  modified_base 2: mod_base = OTHER; note = 2'-deoxycytidine-3'-phosphorothioate
  modified_base 3: mod_base = OTHER; note = 2'-O-methylcytidine-3'-phosphate
  modified_base 4: mod_base = OTHER; note = 2'-O-methyladenosine-3'-phosphate
  modified_base 6: mod_base = OTHER; note = 2'-O-methylguanosine-3'-phosphate
  modified_base 8: mod_base = OTHER; note = 2'-O-methyladenosine-3'-phosphate
  modified_base 9: mod_base = OTHER; note = 2'-O-methyladenosine-3'-phosphate
  modified_base 10: mod_base = OTHER; note = 2'-O-methylguanosine-3'-phosphate
  modified_base 11: mod_base = OTHER; note = 2'-O-methyluridine-3'-phosphate
  modified_base 13: mod_base = OTHER; note = 2'-O-methylcytidine-3'-phosphate
  modified_base 14: mod_base = OTHER; note = 2'-fluoroadenosine-3'-phosphate
  modified_base 15: mod_base = OTHER; note = 2'-O-methylcytidine-3'-phosphate
  modified_base 16: mod_base = OTHER; note = 2'-O-methylcytidine-3'-phosphate
  modified_base 17: mod_base = OTHER; note = 2'-O-methyladenosine-3'-phosphate
  modified_base 18: mod_base = OTHER; note = 2'-O-methylcytidine-3'-phosphate
  modified_base 19: mod_base = OTHER; note = 2'-O-methyluridine-3'-phosphate
  modified_base 20: mod_base = OTHER; note = 2'-O-methyluridine-3'-phosphate
  modified_base 21: mod_base = OTHER; note = 2'-O-methyluridine-3'-phosphorothioate
  modified_base 22: mod_base = OTHER; note = 2'-O-methyladenosine-3'- phosphorothioate
  modified_base 23: mod_base = OTHER; note = 2'-O-methylcytidine-3'-phosphate
  misc_feature 1: note = RNA
  misc_feature 2: note = DNA
  misc_feature 3..4: note = RNA
  misc_feature 5: note = DNA
  misc_feature 6: note = RNA
  misc_feature 7: note = DNA
  misc_feature 8..11: note = RNA
  misc_feature 12: note = DNA
  misc_feature 13..23: note = RNA
tccacgtaagttcaccactttac

SEQ ID NO: 1311 - RNA, 23 nt, synthetic construct
  source 1..23: mol_type = other RNA
  modified_base 1: mod_base = OTHER; note = Vinyl-phosphonate 2'-O-methyluridine-3'-phosphorothioate
  modified_base 2: mod_base = OTHER; note = 2'-fluoroadenosine-3'-phosphorothioate
  modified_base 3: mod_base = OTHER; note = 2'-O-methylcytidine-3'-phosphate
  modified_base 4: mod_base = OTHER; note = 2'-O-methylcytidine-3'-phosphate
  modified_base 5: mod_base = OTHER; note = 2'-O-methyladenosine-3'-phosphate
  modified_base 6: mod_base = OTHER; note = 2'-fluorocytidine-3'-phosphate
  modified_base 7: mod_base = OTHER; note = 2'-O-methylguanosine-3'-phosphate
  modified_base 8: mod_base = OTHER; note = 2'-fluorouridine-3'-phosphate
  modified_base 9: mod_base = OTHER; note = 2'-fluoroadenosine-3'-phosphate
  modified_base 10: mod_base = OTHER; note = 2'-O-methyladenosine-3'-phosphate
  modified_base 11: mod_base = OTHER; note = 2'-O-methylguanosine-3'-phosphate
  modified_base 12: mod_base = OTHER; note = 2'-O-methyluridine-3'-phosphate
  modified_base 13: mod_base = OTHER; note = 2'-O-methyluridine-3'-phosphate
  modified_base 14: mod_base = OTHER; note = 2'-fluorocytidine-3'-phosphate
  modified_base 15: mod_base = OTHER; note = 2'-O-methyladenosine-3'-phosphate
  modified_base 16: mod_base = OTHER; note = 2'-fluorocytidine-3'-phosphate
  modified_base 17: mod_base = OTHER; note = 2'-O-methylcytidine-3'-phosphate
  modified_base 18: mod_base = OTHER; note = 2'-O-methyladenosine-3'-phosphate
  modified_base 19: mod_base = OTHER; note = 2'-O-methylcytidine-3'-phosphate
  modified_base 20: mod_base = OTHER; note = 2'-O-methyluridine-3'-phosphate
  modified_base 21: mod_base = OTHER; note = 2'-O-methyluridine-3'-phosphorothioate
  modified_base 22: mod_base = OTHER; note = 2'-O-methyluridine-3'-phosphorothioate
  modified_base 23: mod_base = OTHER; note = 2'-O-methyladenosine-3'-phosphate
taccacgtaagttcaccacttta

SEQ ID NO: 1312 - DNA, 23 bp, synthetic construct
  source 1..23: mol_type = other DNA
  modified_base 1: mod_base = OTHER; note = Vinyl-phosphonate 2'-O-methyluridine-3'-phosphorothioate
  modified_base 2: mod_base = OTHER; note = 2'-deoxyadenosine-3'-phosphorothioate
  modified_base 3: mod_base = OTHER; note = 2'-O-methylcytidine-3'-phosphate
  modified_base 4: mod_base = OTHER; note = 2'-O-methylcytidine-3'-phosphate
  modified_base 6: mod_base = OTHER; note = 2'-O-methylcytidine-3'-phosphate
  modified_base 8: mod_base = OTHER; note = 2'-O-methyluridine-3'-phosphate
  modified_base 9: mod_base = OTHER; note = 2'-O-methyladenosine-3'-phosphate
  modified_base 10: mod_base = OTHER; note = 2'-O-methyladenosine-3'-phosphate
  modified_base 11: mod_base = OTHER; note = 2'-O-methylguanosine-3'-phosphate
  modified_base 13: mod_base = OTHER; note = 2'-O-methyluridine-3'-phosphate
  modified_base 14: mod_base = OTHER; note = 2'-fluorocytidine-3'-phosphate
  modified_base 15: mod_base = OTHER; note = 2'-O-methyladenosine-3'-phosphate
  modified_base 16: mod_base = OTHER; note = 2'-O-methylcytidine-3'-phosphate
  modified_base 17: mod_base = OTHER; note = 2'-O-methylcytidine-3'-phosphate
  modified_base 18: mod_base = OTHER; note = 2'-O-methyladenosine-3'-phosphate
  modified_base 19: mod_base = OTHER; note = 2'-O-methylcytidine-3'-phosphate
  modified_base 20: mod_base = OTHER; note = 2'-O-methyluridine-3'-phosphate
  modified_base 21: mod_base = OTHER; note = 2'-O-methyluridine-3'-phosphorothioate
  modified_base 22: mod_base = OTHER; note = 2'-O-methyluridine-3'-phosphorothioate
  modified_base 23: mod_base = OTHER; note = 2'-O-methyladenosine-3'-phosphate
  misc_feature 1: note = RNA
  misc_feature 2: note = DNA
  misc_feature 3..4: note = RNA
  misc_feature 5: note = DNA
  misc_feature 6: note = RNA
  misc_feature 7: note = DNA
  misc_feature 8..11: note = RNA
  misc_feature 12: note = DNA
  misc_feature 13..23: note = RNA
taccacgtaagttcaccacttta

SEQ ID NO: 1313 - RNA, 23 nt, synthetic construct
  source 1..23: mol_type = other RNA
  modified_base 1: mod_base = OTHER; note = Vinyl-phosphonate 2'-O-methyluridine-3'-phosphorothioate
  modified_base 2: mod_base = OTHER; note = 2'-fluorocytidine-3'-phosphorothioate
  modified_base 3: mod_base = OTHER; note = 2'-O-methyladenosine-3'-phosphate
  modified_base 4: mod_base = OTHER; note = 2'-O-methylcytidine-3'-phosphate
  modified_base 5: mod_base = OTHER; note = 2'-O-methylcytidine-3'-phosphate
  modified_base 6: mod_base = OTHER; note = 2'-fluoroadenosine-3'-phosphate
  modified_base 7: mod_base = OTHER; note = 2'-O-methylcytidine-3'-phosphate
  modified_base 8: mod_base = OTHER; note = 2'-fluoroguanosine-3'-phosphate
  modified_base 9: mod_base = OTHER; note = 2'-fluorouridine-3'-phosphate
  modified_base 10: mod_base = OTHER; note = 2'-O-methyladenosine-3'-phosphate
  modified_base 11: mod_base = OTHER; note = 2'-O-methyladenosine-3'-phosphate
  modified_base 12: mod_base = OTHER; note = 2'-O-methylguanosine-3'-phosphate
  modified_base 13: mod_base = OTHER; note = 2'-O-methyluridine-3'-phosphate
  modified_base 14: mod_base = OTHER; note = 2'-fluorouridine-3'-phosphate
  modified_base 15: mod_base = OTHER; note = 2'-O-methylcytidine-3'-phosphate
  modified_base 16: mod_base = OTHER; note = 2'-fluoroadenosine-3'-phosphate
  modified_base 17: mod_base = OTHER; note = 2'-O-methylcytidine-3'-phosphate
  modified_base 18: mod_base = OTHER; note = 2'-O-methylcytidine-3'-phosphate
  modified_base 19: mod_base = OTHER; note = 2'-O-methyladenosine-3'-phosphate
  modified_base 20: mod_base = OTHER; note = 2'-O-methylcytidine-3'-phosphate
  modified_base 21: mod_base = OTHER; note = 2'-O-methyluridine-3'-phosphorothioate
  modified_base 22: mod_base = OTHER; note = 2'-O-methyluridine-3'-phosphorothioate
  modified_base 23: mod_base = OTHER; note = 2'-O-methyluridine-3'-phosphate
tcaccacgtaagttcaccacttt

SEQ ID NO: 1314 - DNA, 23 bp, synthetic construct
  source 1..23: mol_type = other DNA
  modified_base 1: mod_base = OTHER; note = Vinyl-phosphonate 2'-O-methyluridine-3'-phosphorothioate
  modified_base 2: mod_base = OTHER; note = 2'-deoxycytidine-3'-phosphorothioate
  modified_base 3: mod_base = OTHER; note = 2'-O-methyladenosine-3'-phosphate
  modified_base 4: mod_base = OTHER; note = 2'-O-methylcytidine-3'-phosphate
  modified_base 6: mod_base = OTHER; note = 2'-O-methyladenosine-3'-phosphate
  modified_base 8: mod_base = OTHER; note = 2'-O-methylguanosine-3'-phosphate
  modified_base 9: mod_base = OTHER; note = 2'-O-methyluridine-3'-phosphate
  modified_base 10: mod_base = OTHER; note = 2'-O-methyladenosine-3'-phosphate
  modified_base 11: mod_base = OTHER; note = 2'-O-methyladenosine-3'-phosphate
  modified_base 13: mod_base = OTHER; note = 2'-O-methyluridine-3'-phosphate
  modified_base 14: mod_base = OTHER; note = 2'-fluorouridine-3'-phosphate
  modified_base 15: mod_base = OTHER; note = 2'-O-methylcytidine-3'-phosphate
  modified_base 16: mod_base = OTHER; note = 2'-O-methyladenosine-3'-phosphate
  modified_base 17: mod_base = OTHER; note = 2'-O-methylcytidine-3'-phosphate
  modified_base 18: mod_base = OTHER; note = 2'-O-methylcytidine-3'-phosphate
  modified_base 19: mod_base = OTHER; note = 2'-O-methyladenosine-3'-phosphate
  modified_base 20: mod_base = OTHER; note = 2'-O-methylcytidine-3'-phosphate
  modified_base 21: mod_base = OTHER; note = 2'-O-methyluridine-3'-phosphorothioate
  modified_base 22: mod_base = OTHER; note = 2'-O-methyluridine-3'-phosphorothioate
  modified_base 23: mod_base = OTHER; note = 2'-O-methyluridine-3'-phosphate
  misc_feature 1: note = RNA
  misc_feature 2: note = DNA
  misc_feature 3..4: note = RNA
  misc_feature 5: note = DNA
  misc_feature 6: note = RNA
  misc_feature 7: note = DNA
  misc_feature 8..11: note = RNA
  misc_feature 12: note = DNA
  misc_feature 13..23: note = RNA
tcaccacgtaagttcaccacttt

SEQ ID NO: 1315 - DNA, 23 bp, synthetic construct
  source 1..23: mol_type = other DNA
  modified_base 1: mod_base = OTHER; note = Vinyl-phosphonate 2'-O-methyluridine-3'-phosphorothioate
  modified_base 2: mod_base = OTHER; note = 2'-fluorouridine -3'-phosphorothioate
  modified_base 3: mod_base = OTHER; note = 2'-O-methylcytidine-3'-phosphate
  modified_base 4: mod_base = OTHER; note = 2'-O-methyladenosine-3'-phosphate
  modified_base 6: mod_base = OTHER; note = 2'-O-methylcytidine-3'-phosphate
  modified_base 7: mod_base = OTHER; note = Adenosine-glycol nucleic acid (GNA) S-Isomer
  modified_base 8: mod_base = OTHER; note = 2'-O-methylcytidine-3'-phosphate
  modified_base 9: mod_base = OTHER; note = 2'-O-methylguanosine-3'-phosphate
  modified_base 10: mod_base = OTHER; note = 2'-O-methyluridine-3'-phosphate
  modified_base 11: mod_base = OTHER; note = 2'-O-methyladenosine-3'-phosphate
  modified_base 12: mod_base = OTHER; note = 2'-O-methyladenosine-3'-phosphate
  modified_base 13: mod_base = OTHER; note = 2'-O-methylguanosine-3'-phosphate
  modified_base 14: mod_base = OTHER; note = 2'-fluorouridine-3'-phosphate
  modified_base 15: mod_base = OTHER; note = 2'-O-methyluridine-3'-phosphate
  modified_base 16: mod_base = OTHER; note = 2'-fluorocytidine-3'-phosphate
  modified_base 17: mod_base = OTHER; note = 2'-O-methyladenosine-3'-phosphate
  modified_base 18: mod_base = OTHER; note = 2'-O-methylcytidine-3'-phosphate
  modified_base 19: mod_base = OTHER; note = 2'-O-methylcytidine-3'-phosphate
  modified_base 20: mod_base = OTHER; note = 2'-O-methyladenosine-3'-phosphate
  modified_base 21: mod_base = OTHER; note = 2'-O-methylcytidine-3'- phosphorothioate
  modified_base 22: mod_base = OTHER; note = 2'-O-methyluridine-3'-phosphorothioate
  modified_base 23: mod_base = OTHER; note = 2'-O-methyluridine-3'-phosphate
  misc_feature 1..4: note = RNA
  misc_feature 5: note = DNA
  misc_feature 6..23: note = RNA
ttcaccacgtaagttcaccactt

SEQ ID NO: 1316 - RNA, 23 nt, synthetic construct
  source 1..23: mol_type = other RNA
  modified_base 1: mod_base = OTHER; note = Vinyl-phosphonate 2'-O-methyluridine-3'-phosphorothioate
  modified_base 2: mod_base = OTHER; note = 2'-fluorouridine -3'-phosphorothioate
  modified_base 3: mod_base = OTHER; note = 2'-O-methylcytidine-3'-phosphate
  modified_base 4: mod_base = OTHER; note = 2'-O-methyladenosine-3'-phosphate
  modified_base 5: mod_base = OTHER; note = 2'-O-methylcytidine-3'-phosphate
  modified_base 6: mod_base = OTHER; note = 2'-fluorocytidine-3'-phosphate
  modified_base 7: mod_base = OTHER; note = 2'-O-methyladenosine-3'-phosphate
  modified_base 8: mod_base = OTHER; note = 2'-fluorocytidine-3'-phosphate
  modified_base 9: mod_base = OTHER; note = 2'-fluoroguanosine-3'-phosphate
  modified_base 10: mod_base = OTHER; note = 2'-O-methyluridine-3'-phosphate
  modified_base 11: mod_base = OTHER; note = 2'-O-methyladenosine-3'-phosphate
  modified_base 12: mod_base = OTHER; note = 2'-O-methyladenosine-3'-phosphate
  modified_base 13: mod_base = OTHER; note = 2'-O-methylguanosine-3'-phosphate
  modified_base 14: mod_base = OTHER; note = 2'-fluorouridine-3'-phosphate
  modified_base 15: mod_base = OTHER; note = 2'-O-methyluridine-3'-phosphate
  modified_base 16: mod_base = OTHER; note = 2'-fluorocytidine-3'-phosphate
  modified_base 17: mod_base = OTHER; note = 2'-O-methyladenosine-3'-phosphate
  modified_base 18: mod_base = OTHER; note = 2'-O-methylcytidine-3'-phosphate
  modified_base 19: mod_base = OTHER; note = 2'-O-methylcytidine-3'-phosphate
  modified_base 20: mod_base = OTHER; note = 2'-O-methyladenosine-3'-phosphate
  modified_base 21: mod_base = OTHER; note = 2'-O-methylcytidine-3'- phosphorothioate
  modified_base 22: mod_base = OTHER; note = 2'-O-methyluridine-3'-phosphorothioate
  modified_base 23: mod_base = OTHER; note = 2'-O-methyluridine-3'-phosphate
ttcaccacgtaagttcaccactt

SEQ ID NO: 1317 - DNA, 23 bp, synthetic construct
  source 1..23: mol_type = other DNA
  modified_base 1: mod_base = OTHER; note = Vinyl-phosphonate 2'-O-methyluridine-3'-phosphorothioate
  modified_base 2: mod_base = OTHER; note = 2'-deoxythymidine-3'-phosphorothioate
  modified_base 3: mod_base = OTHER; note = 2'-O-methylcytidine-3'-phosphate
  modified_base 4: mod_base = OTHER; note = 2'-O-methyladenosine-3'-phosphate
  modified_base 6: mod_base = OTHER; note = 2'-O-methylcytidine-3'-phosphate
  modified_base 8: mod_base = OTHER; note = 2'-O-methylcytidine-3'-phosphate
  modified_base 9: mod_base = OTHER; note = 2'-O-methylguanosine-3'-phosphate
  modified_base 10: mod_base = OTHER; note = 2'-O-methyluridine-3'-phosphate
  modified_base 11: mod_base = OTHER; note = 2'-O-methyladenosine-3'-phosphate
  modified_base 13: mod_base = OTHER; note = 2'-O-methylguanosine-3'-phosphate
  modified_base 14: mod_base = OTHER; note = 2'-fluorouridine-3'-phosphate
  modified_base 15: mod_base = OTHER; note = 2'-O-methyluridine-3'-phosphate
  modified_base 16: mod_base = OTHER; note = 2'-O-methylcytidine-3'-phosphate
  modified_base 17: mod_base = OTHER; note = 2'-O-methyladenosine-3'-phosphate
  modified_base 18: mod_base = OTHER; note = 2'-O-methylcytidine-3'-phosphate
  modified_base 19: mod_base = OTHER; note = 2'-O-methylcytidine-3'-phosphate
  modified_base 20: mod_base = OTHER; note = 2'-O-methyladenosine-3'-phosphate
  modified_base 21: mod_base = OTHER; note = 2'-O-methylcytidine-3'- phosphorothioate
  modified_base 22: mod_base = OTHER; note = 2'-O-methyluridine-3'-phosphorothioate
  modified_base 23: mod_base = OTHER; note = 2'-O-methyluridine-3'-phosphate
  misc_feature 1: note = RNA
  misc_feature 2: note = DNA
  misc_feature 3..4: note = RNA
  misc_feature 5: note = DNA
  misc_feature 6: note = RNA
  misc_feature 7: note = DNA
  misc_feature 8..11: note = RNA
  misc_feature 12: note = DNA
  misc_feature 13..23: note = RNA
ttcaccacgtaagttcaccactt

SEQ ID NO: 1318 - DNA, 23 bp, synthetic construct
  source 1..23: mol_type = other DNA
  modified_base 1: mod_base = OTHER; note = Vinyl-phosphonate 2'-O-methyluridine-3'-phosphorothioate
  modified_base 2: mod_base = OTHER; note = 2'-fluorouridine -3'-phosphorothioate
  modified_base 3: mod_base = OTHER; note = 2'-O-methyladenosine-3'-phosphate
  modified_base 4: mod_base = OTHER; note = 2'-O-methyladenosine-3'-phosphate
  modified_base 6: mod_base = OTHER; note = 2'-O-methylcytidine-3'-phosphate
  modified_base 7: mod_base = OTHER; note = Adenosine-glycol nucleic acid (GNA) S-Isomer
  modified_base 8: mod_base = OTHER; note = 2'-O-methylcytidine-3'-phosphate
  modified_base 9: mod_base = OTHER; note = 2'-O-methylcytidine-3'-phosphate
  modified_base 10: mod_base = OTHER; note = 2'-O-methyladenosine-3'-phosphate
  modified_base 11: mod_base = OTHER; note = 2'-O-methylcytidine-3'-phosphate
  modified_base 12: mod_base = OTHER; note = 2'-O-methylguanosine-3'-phosphate
  modified_base 13: mod_base = OTHER; note = 2'-O-methyluridine-3'-phosphate
  modified_base 14: mod_base = OTHER; note = 2'-fluoroadenosine-3'-phosphate
  modified_base 15: mod_base = OTHER; note = 2'-O-methyladenosine-3'-phosphate
  modified_base 16: mod_base = OTHER; note = 2'-fluoroguanosine-3'-phosphate
  modified_base 17: mod_base = OTHER; note = 2'-O-methyluridine-3'-phosphate
  modified_base 18: mod_base = OTHER; note = 2'-O-methyluridine-3'-phosphate
  modified_base 19: mod_base = OTHER; note = 2'-O-methylcytidine-3'-phosphate
  modified_base 20: mod_base = OTHER; note = 2'-O-methyladenosine-3'-phosphate
  modified_base 21: mod_base = OTHER; note = 2'-O-methylcytidine-3'- phosphorothioate
  modified_base 22: mod_base = OTHER; note = 2'-O-methylcytidine-3'- phosphorothioate
  modified_base 23: mod_base = OTHER; note = 2'-O-methyladenosine-3'-phosphate
  misc_feature 1..4: note = RNA
  misc_feature 5: note = DNA
  misc_feature 6..23: note = RNA
ttaatcaccacgtaagttcacca

SEQ ID NO: 1319 - DNA, 23 bp, synthetic construct
  source 1..23: mol_type = other DNA
  modified_base 1: mod_base = OTHER; note = Vinyl-phosphonate 2'-O-methyluridine-3'-phosphorothioate
  modified_base 2: mod_base = OTHER; note = 2'-fluoroadenosine-3'-phosphorothioate
  modified_base 3: mod_base = OTHER; note = 2'-O-methyluridine-3'-phosphate
  modified_base 4: mod_base = OTHER; note = 2'-O-methyluridine-3'-phosphate
  modified_base 6: mod_base = OTHER; note = 2'-O-methyladenosine-3'-phosphate
  modified_base 7: mod_base = OTHER; note = Thymidine-glycol nucleic acid (GNA) S-Isomer
  modified_base 8: mod_base = OTHER; note = 2'-O-methylcytidine-3'-phosphate
  modified_base 9: mod_base = OTHER; note = 2'-O-methyladenosine-3'-phosphate
  modified_base 10: mod_base = OTHER; note = 2'-O-methylcytidine-3'-phosphate
  modified_base 11: mod_base = OTHER; note = 2'-O-methylcytidine-3'-phosphate
  modified_base 12: mod_base = OTHER; note = 2'-O-methyladenosine-3'-phosphate
  modified_base 13: mod_base = OTHER; note = 2'-O-methylcytidine-3'-phosphate
  modified_base 14: mod_base = OTHER; note = 2'-fluoroguanosine-3'-phosphate
  modified_base 15: mod_base = OTHER; note = 2'-O-methyluridine-3'-phosphate
  modified_base 16: mod_base = OTHER; note = 2'-fluoroadenosine-3'-phosphate
  modified_base 17: mod_base = OTHER; note = 2'-O-methyladenosine-3'-phosphate
  modified_base 18: mod_base = OTHER; note = 2'-O-methylguanosine-3'-phosphate
  modified_base 19: mod_base = OTHER; note = 2'-O-methyluridine-3'-phosphate
  modified_base 20: mod_base = OTHER; note = 2'-O-methyluridine-3'-phosphate
  modified_base 21: mod_base = OTHER; note = 2'-O-methylcytidine-3'- phosphorothioate
  modified_base 22: mod_base = OTHER; note = 2'-O-methyladenosine-3'- phosphorothioate
  modified_base 23: mod_base = OTHER; note = 2'-O-methylcytidine-3'-phosphate
  misc_feature 1..4: note = RNA
  misc_feature 5: note = DNA
  misc_feature 6: note = RNA
  misc_feature 7: note = DNA
  misc_feature 8..23: note = RNA
tattaatcaccacgtaagttcac

SEQ ID NO: 1320 - RNA, 23 nt, synthetic construct
  source 1..23: mol_type = other RNA
  modified_base 1: mod_base = OTHER; note = Vinyl-phosphonate 2'-O-methyluridine-3'-phosphorothioate
  modified_base 2: mod_base = OTHER; note = 2'-fluoroadenosine-3'-phosphorothioate
  modified_base 3: mod_base = OTHER; note = 2'-O-methyluridine-3'-phosphate
  modified_base 4: mod_base = OTHER; note = 2'-O-methyluridine-3'-phosphate
  modified_base 5: mod_base = OTHER; note = 2'-O-methyladenosine-3'-phosphate
  modified_base 6: mod_base = OTHER; note = 2'-fluoroadenosine-3'-phosphate
  modified_base 7: mod_base = OTHER; note = 2'-O-methyluridine-3'-phosphate
  modified_base 8: mod_base = OTHER; note = 2'-fluorocytidine-3'-phosphate
  modified_base 9: mod_base = OTHER; note = 2'-fluoroadenosine-3'-phosphate
  modified_base 10: mod_base = OTHER; note = 2'-O-methylcytidine-3'-phosphate
  modified_base 11: mod_base = OTHER; note = 2'-O-methylcytidine-3'-phosphate
  modified_base 12: mod_base = OTHER; note = 2'-O-methyladenosine-3'-phosphate
  modified_base 13: mod_base = OTHER; note = 2'-O-methylcytidine-3'-phosphate
  modified_base 14: mod_base = OTHER; note = 2'-fluoroguanosine-3'-phosphate
  modified_base 15: mod_base = OTHER; note = 2'-O-methyluridine-3'-phosphate
  modified_base 16: mod_base = OTHER; note = 2'-fluoroadenosine-3'-phosphate
  modified_base 17: mod_base = OTHER; note = 2'-O-methyladenosine-3'-phosphate
  modified_base 18: mod_base = OTHER; note = 2'-O-methylguanosine-3'-phosphate
  modified_base 19: mod_base = OTHER; note = 2'-O-methyluridine-3'-phosphate
  modified_base 20: mod_base = OTHER; note = 2'-O-methyluridine-3'-phosphate
  modified_base 21: mod_base = OTHER; note = 2'-O-methylcytidine-3'- phosphorothioate
  modified_base 22: mod_base = OTHER; note = 2'-O-methyladenosine-3'- phosphorothioate
  modified_base 23: mod_base = OTHER; note = 2'-O-methylcytidine-3'-phosphate
tattaatcaccacgtaagttcac

SEQ ID NO: 1321 - DNA, 23 bp, synthetic construct
  source 1..23: mol_type = other DNA
  modified_base 1: mod_base = OTHER; note = Vinyl-phosphonate 2'-O-methyluridine-3'-phosphorothioate
  modified_base 2: mod_base = OTHER; note = 2'-deoxyadenosine-3'-phosphorothioate
  modified_base 3: mod_base = OTHER; note = 2'-O-methyluridine-3'-phosphate
  modified_base 4: mod_base = OTHER; note = 2'-O-methyluridine-3'-phosphate
  modified_base 6: mod_base = OTHER; note = 2'-O-methyladenosine-3'-phosphate
  modified_base 8: mod_base = OTHER; note = 2'-O-methylcytidine-3'-phosphate
  modified_base 9: mod_base = OTHER; note = 2'-O-methyladenosine-3'-phosphate
  modified_base 10: mod_base = OTHER; note = 2'-O-methylcytidine-3'-phosphate
  modified_base 11: mod_base = OTHER; note = 2'-O-methylcytidine-3'-phosphate
  modified_base 13: mod_base = OTHER; note = 2'-O-methylcytidine-3'-phosphate
  modified_base 14: mod_base = OTHER; note = 2'-fluoroguanosine-3'-phosphate
  modified_base 15: mod_base = OTHER; note = 2'-O-methyluridine-3'-phosphate
  modified_base 16: mod_base = OTHER; note = 2'-O-methyladenosine-3'-phosphate
  modified_base 17: mod_base = OTHER; note = 2'-O-methyladenosine-3'-phosphate
  modified_base 18: mod_base = OTHER; note = 2'-O-methylguanosine-3'-phosphate
  modified_base 19: mod_base = OTHER; note = 2'-O-methyluridine-3'-phosphate
  modified_base 20: mod_base = OTHER; note = 2'-O-methyluridine-3'-phosphate
  modified_base 21: mod_base = OTHER; note = 2'-O-methylcytidine-3'- phosphorothioate
  modified_base 22: mod_base = OTHER; note = 2'-O-methyladenosine-3'- phosphorothioate
  modified_base 23: mod_base = OTHER; note = 2'-O-methylcytidine-3'-phosphate
  misc_feature 1: note = RNA
  misc_feature 2: note = DNA
  misc_feature 3..4: note = RNA
  misc_feature 5: note = DNA
  misc_feature 6: note = RNA
  misc_feature 7: note = DNA
  misc_feature 8..11: note = RNA
  misc_feature 12: note = DNA
  misc_feature 13..23: note = RNA
tattaatcaccacgtaagttcac

SEQ ID NO: 1322 - RNA, 23 nt, synthetic construct
  source 1..23: mol_type = other RNA
  modified_base 1: mod_base = OTHER; note = Vinyl-phosphonate 2'-O-methyluridine-3'-phosphorothioate
  modified_base 2: mod_base = OTHER; note = 2'-fluorocytidine-3'-phosphorothioate
  modified_base 3: mod_base = OTHER; note = 2'-O-methyladenosine-3'-phosphate
  modified_base 4: mod_base = OTHER; note = 2'-O-methyluridine-3'-phosphate
  modified_base 5: mod_base = OTHER; note = 2'-O-methyluridine-3'-phosphate
  modified_base 6: mod_base = OTHER; note = 2'-fluoroadenosine-3'-phosphate
  modified_base 7: mod_base = OTHER; note = 2'-O-methyladenosine-3'-phosphate
  modified_base 8: mod_base = OTHER; note = 2'-fluorouridine-3'-phosphate
  modified_base 9: mod_base = OTHER; note = 2'-fluorocytidine-3'-phosphate
  modified_base 10: mod_base = OTHER; note = 2'-O-methyladenosine-3'-phosphate
  modified_base 11: mod_base = OTHER; note = 2'-O-methylcytidine-3'-phosphate
  modified_base 12: mod_base = OTHER; note = 2'-O-methylcytidine-3'-phosphate
  modified_base 13: mod_base = OTHER; note = 2'-O-methyladenosine-3'-phosphate
  modified_base 14: mod_base = OTHER; note = 2'-fluorocytidine-3'-phosphate
  modified_base 15: mod_base = OTHER; note = 2'-O-methylguanosine-3'-phosphate
  modified_base 16: mod_base = OTHER; note = 2'-fluorouridine-3'-phosphate
  modified_base 17: mod_base = OTHER; note = 2'-O-methyladenosine-3'-phosphate
  modified_base 18: mod_base = OTHER; note = 2'-O-methyladenosine-3'-phosphate
  modified_base 19: mod_base = OTHER; note = 2'-O-methylguanosine-3'-phosphate
  modified_base 20: mod_base = OTHER; note = 2'-O-methyluridine-3'-phosphate
  modified_base 21: mod_base = OTHER; note = 2'-O-methyluridine-3'-phosphorothioate
  modified_base 22: mod_base = OTHER; note = 2'-O-methylcytidine-3'- phosphorothioate
  modified_base 23: mod_base = OTHER; note = 2'-O-methyladenosine-3'-phosphate
tcattaatcaccacgtaagttca

SEQ ID NO: 1323 - DNA, 23 bp, synthetic construct
  source 1..23: mol_type = other DNA
  modified_base 1: mod_base = OTHER; note = Vinyl-phosphonate 2'-O-methyluridine-3'-phosphorothioate
  modified_base 2: mod_base = OTHER; note = 2'-deoxycytidine-3'-phosphorothioate
  modified_base 3: mod_base = OTHER; note = 2'-O-methyladenosine-3'-phosphate
  modified_base 4: mod_base = OTHER; note = 2'-O-methyluridine-3'-phosphate
  modified_base 6: mod_base = OTHER; note = 2'-O-methyladenosine-3'-phosphate
  modified_base 8: mod_base = OTHER; note = 2'-O-methyluridine-3'-phosphate
  modified_base 9: mod_base = OTHER; note = 2'-O-methylcytidine-3'-phosphate
  modified_base 10: mod_base = OTHER; note = 2'-O-methyladenosine-3'-phosphate
  modified_base 11: mod_base = OTHER; note = 2'-O-methylcytidine-3'-phosphate
  modified_base 13: mod_base = OTHER; note = 2'-O-methyladenosine-3'-phosphate
  modified_base 14: mod_base = OTHER; note = 2'-fluorocytidine-3'-phosphate
  modified_base 15: mod_base = OTHER; note = 2'-O-methylguanosine-3'-phosphate
  modified_base 16: mod_base = OTHER; note = 2'-O-methyluridine-3'-phosphate
  modified_base 17: mod_base = OTHER; note = 2'-O-methyladenosine-3'-phosphate
  modified_base 18: mod_base = OTHER; note = 2'-O-methyladenosine-3'-phosphate
  modified_base 19: mod_base = OTHER; note = 2'-O-methylguanosine-3'-phosphate
  modified_base 20: mod_base = OTHER; note = 2'-O-methyluridine-3'-phosphate
  modified_base 21: mod_base = OTHER; note = 2'-O-methyluridine-3'-phosphorothioate
  modified_base 22: mod_base = OTHER; note = 2'-O-methylcytidine-3'- phosphorothioate
  modified_base 23: mod_base = OTHER; note = 2'-O-methyladenosine-3'-phosphate
  misc_feature 1: note = RNA
  misc_feature 2: note = DNA
  misc_feature 3..4: note = RNA
  misc_feature 5: note = DNA
  misc_feature 6: note = RNA
  misc_feature 7: note = DNA
  misc_feature 8..11: note = RNA
  misc_feature 12: note = DNA
  misc_feature 13..23: note = RNA
tcattaatcaccacgtaagttca

SEQ ID NO: 1324 - RNA, 23 nt, synthetic construct
  source 1..23: mol_type = other RNA
  modified_base 1: mod_base = OTHER; note = Vinyl-phosphonate 2'-O-methyluridine-3'-phosphorothioate
  modified_base 2: mod_base = OTHER; note = 2'-fluorouridine -3'-phosphorothioate
  modified_base 3: mod_base = OTHER; note = 2'-O-methylcytidine-3'-phosphate
  modified_base 4: mod_base = OTHER; note = 2'-O-methyladenosine-3'-phosphate
  modified_base 5: mod_base = OTHER; note = 2'-O-methyluridine-3'-phosphate
  modified_base 6: mod_base = OTHER; note = 2'-fluorouridine-3'-phosphate
  modified_base 7: mod_base = OTHER; note = 2'-O-methyladenosine-3'-phosphate
  modified_base 8: mod_base = OTHER; note = 2'-fluoroadenosine-3'-phosphate
  modified_base 9: mod_base = OTHER; note = 2'-fluorouridine-3'-phosphate
  modified_base 10: mod_base = OTHER; note = 2'-O-methylcytidine-3'-phosphate
  modified_base 11: mod_base = OTHER; note = 2'-O-methyladenosine-3'-phosphate
  modified_base 12: mod_base = OTHER; note = 2'-O-methylcytidine-3'-phosphate
  modified_base 13: mod_base = OTHER; note = 2'-O-methylcytidine-3'-phosphate
  modified_base 14: mod_base = OTHER; note = 2'-fluoroadenosine-3'-phosphate
  modified_base 15: mod_base = OTHER; note = 2'-O-methylcytidine-3'-phosphate
  modified_base 16: mod_base = OTHER; note = 2'-fluoroguanosine-3'-phosphate
  modified_base 17: mod_base = OTHER; note = 2'-O-methyluridine-3'-phosphate
  modified_base 18: mod_base = OTHER; note = 2'-O-methyladenosine-3'-phosphate
  modified_base 19: mod_base = OTHER; note = 2'-O-methyladenosine-3'-phosphate
  modified_base 20: mod_base = OTHER; note = 2'-O-methylguanosine-3'-phosphate
  modified_base 21: mod_base = OTHER; note = 2'-O-methyluridine-3'-phosphorothioate
  modified_base 22: mod_base = OTHER; note = 2'-O-methyluridine-3'-phosphorothioate
  modified_base 23: mod_base = OTHER; note = 2'-O-methylcytidine-3'-phosphate
ttcattaatcaccacgtaagttc

SEQ ID NO: 1325 - DNA, 23 bp, synthetic construct
  source 1..23: mol_type = other DNA
  modified_base 1: mod_base = OTHER; note = Vinyl-phosphonate 2'-O-methyluridine-3'-phosphorothioate
  modified_base 2: mod_base = OTHER; note = 2'-deoxythymidine-3'-phosphorothioate
  modified_base 3: mod_base = OTHER; note = 2'-O-methylcytidine-3'-phosphate
  modified_base 4: mod_base = OTHER; note = 2'-O-methyladenosine-3'-phosphate
  modified_base 6: mod_base = OTHER; note = 2'-O-methyluridine-3'-phosphate
  modified_base 8: mod_base = OTHER; note = 2'-O-methyladenosine-3'-phosphate
  modified_base 9: mod_base = OTHER; note = 2'-O-methyluridine-3'-phosphate
  modified_base 10: mod_base = OTHER; note = 2'-O-methylcytidine-3'-phosphate
  modified_base 11: mod_base = OTHER; note = 2'-O-methyladenosine-3'-phosphate
  modified_base 13: mod_base = OTHER; note = 2'-O-methylcytidine-3'-phosphate
  modified_base 14: mod_base = OTHER; note = 2'-fluoroadenosine-3'-phosphate
  modified_base 15: mod_base = OTHER; note = 2'-O-methylcytidine-3'-phosphate
  modified_base 16: mod_base = OTHER; note = 2'-O-methylguanosine-3'-phosphate
  modified_base 17: mod_base = OTHER; note = 2'-O-methyluridine-3'-phosphate
  modified_base 18: mod_base = OTHER; note = 2'-O-methyladenosine-3'-phosphate
  modified_base 19: mod_base = OTHER; note = 2'-O-methyladenosine-3'-phosphate
  modified_base 20: mod_base = OTHER; note = 2'-O-methylguanosine-3'-phosphate
  modified_base 21: mod_base = OTHER; note = 2'-O-methyluridine-3'-phosphorothioate
  modified_base 22: mod_base = OTHER; note = 2'-O-methyluridine-3'-phosphorothioate
  modified_base 23: mod_base = OTHER; note = 2'-O-methylcytidine-3'-phosphate
  misc_feature 1: note = RNA
  misc_feature 2: note = DNA
  misc_feature 3..4: note = RNA
  misc_feature 5: note = DNA
  misc_feature 6: note = RNA
  misc_feature 7: note = DNA
  misc_feature 8..11: note = RNA
  misc_feature 12: note = DNA
  misc_feature 13..23: note = RNA
ttcattaatcaccacgtaagttc

SEQ ID NO: 1326 - DNA, 23 bp, synthetic construct
  source 1..23: mol_type = other DNA
  modified_base 1: mod_base = OTHER; note = Vinyl-phosphonate 2'-O-methyluridine-3'-phosphorothioate
  modified_base 2: mod_base = OTHER; note = 2'-fluorouridine -3'-phosphorothioate
  modified_base 3: mod_base = OTHER; note = 2'-O-methyluridine-3'-phosphate
  modified_base 4: mod_base = OTHER; note = 2'-O-methylcytidine-3'-phosphate
  modified_base 6: mod_base = OTHER; note = 2'-O-methyluridine-3'-phosphate
  modified_base 7: mod_base = OTHER; note = Thymidine-glycol nucleic acid (GNA) S-Isomer
  modified_base 8: mod_base = OTHER; note = 2'-O-methyladenosine-3'-phosphate
  modified_base 9: mod_base = OTHER; note = 2'-O-methyladenosine-3'-phosphate
  modified_base 10: mod_base = OTHER; note = 2'-O-methyluridine-3'-phosphate
  modified_base 11: mod_base = OTHER; note = 2'-O-methylcytidine-3'-phosphate
  modified_base 12: mod_base = OTHER; note = 2'-O-methyladenosine-3'-phosphate
  modified_base 13: mod_base = OTHER; note = 2'-O-methylcytidine-3'-phosphate
  modified_base 14: mod_base = OTHER; note = 2'-fluorocytidine-3'-phosphate
  modified_base 15: mod_base = OTHER; note = 2'-O-methyladenosine-3'-phosphate
  modified_base 16: mod_base = OTHER; note = 2'-fluorocytidine-3'-phosphate
  modified_base 17: mod_base = OTHER; note = 2'-O-methylguanosine-3'-phosphate
  modified_base 18: mod_base = OTHER; note = 2'-O-methyluridine-3'-phosphate
  modified_base 19: mod_base = OTHER; note = 2'-O-methyladenosine-3'-phosphate
  modified_base 20: mod_base = OTHER; note = 2'-O-methyladenosine-3'-phosphate
  modified_base 21: mod_base = OTHER; note = 2'-O-methylguanosine-3'- phosphorothioate
  modified_base 22: mod_base = OTHER; note = 2'-O-methyluridine-3'-phosphorothioate
  modified_base 23: mod_base = OTHER; note = 2'-O-methyluridine-3'-phosphate
  misc_feature 1..4: note = RNA
  misc_feature 5: note = DNA
  misc_feature 6: note = RNA
  misc_feature 7: note = DNA
  misc_feature 8..23: note = RNA
tttcattaatcaccacgtaagtt

SEQ ID NO: 1327 - RNA, 23 nt, synthetic construct
  source 1..23: mol_type = other RNA
  modified_base 1: mod_base = OTHER; note = Vinyl-phosphonate 2'-O-methyluridine-3'-phosphorothioate
  modified_base 2: mod_base = OTHER; note = 2'-fluorouridine -3'-phosphorothioate
  modified_base 3: mod_base = OTHER; note = 2'-O-methyluridine-3'-phosphate
  modified_base 4: mod_base = OTHER; note = 2'-O-methylcytidine-3'-phosphate
  modified_base 5: mod_base = OTHER; note = 2'-O-methyladenosine-3'-phosphate
  modified_base 6: mod_base = OTHER; note = 2'-fluorouridine-3'-phosphate
  modified_base 7: mod_base = OTHER; note = 2'-O-methyluridine-3'-phosphate
  modified_base 8: mod_base = OTHER; note = 2'-fluoroadenosine-3'-phosphate
  modified_base 9: mod_base = OTHER; note = 2'-fluoroadenosine-3'-phosphate
  modified_base 10: mod_base = OTHER; note = 2'-O-methyluridine-3'-phosphate
  modified_base 11: mod_base = OTHER; note = 2'-O-methylcytidine-3'-phosphate
  modified_base 12: mod_base = OTHER; note = 2'-O-methyladenosine-3'-phosphate
  modified_base 13: mod_base = OTHER; note = 2'-O-methylcytidine-3'-phosphate
  modified_base 14: mod_base = OTHER; note = 2'-fluorocytidine-3'-phosphate
  modified_base 15: mod_base = OTHER; note = 2'-O-methyladenosine-3'-phosphate
  modified_base 16: mod_base = OTHER; note = 2'-fluorocytidine-3'-phosphate
  modified_base 17: mod_base = OTHER; note = 2'-O-methylguanosine-3'-phosphate
  modified_base 18: mod_base = OTHER; note = 2'-O-methyluridine-3'-phosphate
  modified_base 19: mod_base = OTHER; note = 2'-O-methyladenosine-3'-phosphate
  modified_base 20: mod_base = OTHER; note = 2'-O-methyladenosine-3'-phosphate
  modified_base 21: mod_base = OTHER; note = 2'-O-methylguanosine-3'- phosphorothioate
  modified_base 22: mod_base = OTHER; note = 2'-O-methyluridine-3'-phosphorothioate
  modified_base 23: mod_base = OTHER; note = 2'-O-methyluridine-3'-phosphate
tttcattaatcaccacgtaagtt

SEQ ID NO: 1328 - DNA, 23 bp, synthetic construct
  source 1..23: mol_type = other DNA
  modified_base 1: mod_base = OTHER; note = Vinyl-phosphonate 2'-O-methyluridine-3'-phosphorothioate
  modified_base 2: mod_base = OTHER; note = 2'-deoxythymidine-3'-phosphorothioate
  modified_base 3: mod_base = OTHER; note = 2'-O-methyluridine-3'-phosphate
  modified_base 4: mod_base = OTHER; note = 2'-O-methylcytidine-3'-phosphate
  modified_base 6: mod_base = OTHER; note = 2'-O-methyluridine-3'-phosphate
  modified_base 8: mod_base = OTHER; note = 2'-O-methyladenosine-3'-phosphate
  modified_base 9: mod_base = OTHER; note = 2'-O-methyladenosine-3'-phosphate
  modified_base 10: mod_base = OTHER; note = 2'-O-methyluridine-3'-phosphate
  modified_base 11: mod_base = OTHER; note = 2'-O-methylcytidine-3'-phosphate
  modified_base 13: mod_base = OTHER; note = 2'-O-methylcytidine-3'-phosphate
  modified_base 14: mod_base = OTHER; note = 2'-fluorocytidine-3'-phosphate
  modified_base 15: mod_base = OTHER; note = 2'-O-methyladenosine-3'-phosphate
  modified_base 16: mod_base = OTHER; note = 2'-O-methylcytidine-3'-phosphate
  modified_base 17: mod_base = OTHER; note = 2'-O-methylguanosine-3'-phosphate
  modified_base 18: mod_base = OTHER; note = 2'-O-methyluridine-3'-phosphate
  modified_base 19: mod_base = OTHER; note = 2'-O-methyladenosine-3'-phosphate
  modified_base 20: mod_base = OTHER; note = 2'-O-methyladenosine-3'-phosphate
  modified_base 21: mod_base = OTHER; note = 2'-O-methylguanosine-3'- phosphorothioate
  modified_base 22: mod_base = OTHER; note = 2'-O-methyluridine-3'-phosphorothioate
  modified_base 23: mod_base = OTHER; note = 2'-O-methyluridine-3'-phosphate
  misc_feature 1: note = RNA
  misc_feature 2: note = DNA
  misc_feature 3..4: note = RNA
  misc_feature 5: note = DNA
  misc_feature 6: note = RNA
  misc_feature 7: note = DNA
  misc_feature 8..11: note = RNA
  misc_feature 12: note = DNA
  misc_feature 13..23: note = RNA
tttcattaatcaccacgtaagtt

SEQ ID NO: 1329 - DNA, 23 bp, synthetic construct
  source 1..23: mol_type = other DNA
  modified_base 1: mod_base = OTHER; note = Vinyl-phosphonate 2'-O-methyluridine-3'-phosphorothioate
  modified_base 2: mod_base = OTHER; note = 2'-fluorouridine -3'-phosphorothioate
  modified_base 3: mod_base = OTHER; note = 2'-O-methyluridine-3'-phosphate
  modified_base 4: mod_base = OTHER; note = 2'-O-methyluridine-3'-phosphate
  modified_base 6: mod_base = OTHER; note = 2'-O-methyladenosine-3'-phosphate
  modified_base 7: mod_base = OTHER; note = Thymidine-glycol nucleic acid (GNA) S-Isomer
  modified_base 8: mod_base = OTHER; note = 2'-O-methyluridine-3'-phosphate
  modified_base 9: mod_base = OTHER; note = 2'-O-methyladenosine-3'-phosphate
  modified_base 10: mod_base = OTHER; note = 2'-O-methyladenosine-3'-phosphate
  modified_base 11: mod_base = OTHER; note = 2'-O-methyluridine-3'-phosphate
  modified_base 12: mod_base = OTHER; note = 2'-O-methylcytidine-3'-phosphate
  modified_base 13: mod_base = OTHER; note = 2'-O-methyladenosine-3'-phosphate
  modified_base 14: mod_base = OTHER; note = 2'-fluorocytidine-3'-phosphate
  modified_base 15: mod_base = OTHER; note = 2'-O-methylcytidine-3'-phosphate
  modified_base 16: mod_base = OTHER; note = 2'-fluoroadenosine-3'-phosphate
  modified_base 17: mod_base = OTHER; note = 2'-O-methylcytidine-3'-phosphate
  modified_base 18: mod_base = OTHER; note = 2'-O-methylguanosine-3'-phosphate
  modified_base 19: mod_base = OTHER; note = 2'-O-methyluridine-3'-phosphate
  modified_base 20: mod_base = OTHER; note = 2'-O-methyladenosine-3'-phosphate
  modified_base 21: mod_base = OTHER; note = 2'-O-methyladenosine-3'- phosphorothioate
  modified_base 22: mod_base = OTHER; note = 2'-O-methylguanosine-3'- phosphorothioate
  modified_base 23: mod_base = OTHER; note = 2'-O-methyluridine-3'-phosphate
  misc_feature 1..4: note = RNA
  misc_feature 5: note = DNA
  misc_feature 6: note = RNA
  misc_feature 7: note = DNA
  misc_feature 8..23: note = RNA
ttttcattaatcaccacgtaagt

SEQ ID NO: 1330 - DNA, 23 bp, synthetic construct
  source 1..23: mol_type = other DNA
  modified_base 1: mod_base = OTHER; note = Vinyl-phosphonate 2'-O-methyluridine-3'-phosphorothioate
  modified_base 2: mod_base = OTHER; note = 2'-fluoroadenosine-3'-phosphorothioate
  modified_base 3: mod_base = OTHER; note = 2'-O-methyluridine-3'-phosphate
  modified_base 4: mod_base = OTHER; note = 2'-O-methyluridine-3'-phosphate
  modified_base 6: mod_base = OTHER; note = 2'-O-methylcytidine-3'-phosphate
  modified_base 7: mod_base = OTHER; note = Adenosine-glycol nucleic acid (GNA) S-Isomer
  modified_base 8: mod_base = OTHER; note = 2'-O-methyluridine-3'-phosphate
  modified_base 9: mod_base = OTHER; note = 2'-O-methyluridine-3'-phosphate
  modified_base 10: mod_base = OTHER; note = 2'-O-methyladenosine-3'-phosphate
  modified_base 11: mod_base = OTHER; note = 2'-O-methyladenosine-3'-phosphate
  modified_base 12: mod_base = OTHER; note = 2'-O-methyluridine-3'-phosphate
  modified_base 13: mod_base = OTHER; note = 2'-O-methylcytidine-3'-phosphate
  modified_base 14: mod_base = OTHER; note = 2'-fluoroadenosine-3'-phosphate
  modified_base 15: mod_base = OTHER; note = 2'-O-methylcytidine-3'-phosphate
  modified_base 16: mod_base = OTHER; note = 2'-fluorocytidine-3'-phosphate
  modified_base 17: mod_base = OTHER; note = 2'-O-methyladenosine-3'-phosphate
  modified_base 18: mod_base = OTHER; note = 2'-O-methylcytidine-3'-phosphate
  modified_base 19: mod_base = OTHER; note = 2'-O-methylguanosine-3'-phosphate
  modified_base 20: mod_base = OTHER; note = 2'-O-methyluridine-3'-phosphate
  modified_base 21: mod_base = OTHER; note = 2'-O-methyladenosine-3'- phosphorothioate
  modified_base 22: mod_base = OTHER; note = 2'-O-methyladenosine-3'- phosphorothioate
  modified_base 23: mod_base = OTHER; note = 2'-O-methylguanosine-3'-phosphate
  misc_feature 1..4: note = RNA
  misc_feature 5: note = DNA
  misc_feature 6..23: note = RNA
tatttcattaatcaccacgtaag

SEQ ID NO: 1331 - DNA, 23 bp, synthetic construct
  source 1..23: mol_type = other DNA
  modified_base 1: mod_base = OTHER; note = Vinyl-phosphonate 2'-O-methyluridine-3'-phosphorothioate
  modified_base 2: mod_base = OTHER; note = 2'-fluoroguanosine-3'-phosphorothioate
  modified_base 3: mod_base = OTHER; note = 2'-O-methyladenosine-3'-phosphate
  modified_base 4: mod_base = OTHER; note = 2'-O-methyluridine-3'-phosphate
  modified_base 6: mod_base = OTHER; note = 2'-O-methyladenosine-3'-phosphate
  modified_base 7: mod_base = OTHER; note = Thymidine-glycol nucleic acid (GNA) S-Isomer
  modified_base 8: mod_base = OTHER; note = 2'-O-methyluridine-3'-phosphate
  modified_base 9: mod_base = OTHER; note = 2'-O-methyluridine-3'-phosphate
  modified_base 10: mod_base = OTHER; note = 2'-O-methylcytidine-3'-phosphate
  modified_base 11: mod_base = OTHER; note = 2'-O-methyladenosine-3'-phosphate
  modified_base 12: mod_base = OTHER; note = 2'-O-methyluridine-3'-phosphate
  modified_base 13: mod_base = OTHER; note = 2'-O-methyluridine-3'-phosphate
  modified_base 14: mod_base = OTHER; note = 2'-fluoroadenosine-3'-phosphate
  modified_base 15: mod_base = OTHER; note = 2'-O-methyladenosine-3'-phosphate
  modified_base 16: mod_base = OTHER; note = 2'-fluorouridine-3'-phosphate
  modified_base 17: mod_base = OTHER; note = 2'-O-methylcytidine-3'-phosphate
  modified_base 18: mod_base = OTHER; note = 2'-O-methyladenosine-3'-phosphate
  modified_base 19: mod_base = OTHER; note = 2'-O-methylcytidine-3'-phosphate
  modified_base 20: mod_base = OTHER; note = 2'-O-methylcytidine-3'-phosphate
  modified_base 21: mod_base = OTHER; note = 2'-O-methyladenosine-3'- phosphorothioate
  modified_base 22: mod_base = OTHER; note = 2'-O-methylcytidine-3'- phosphorothioate
  modified_base 23: mod_base = OTHER; note = 2'-O-methylguanosine-3'-phosphate
  misc_feature 1..4: note = RNA
  misc_feature 5: note = DNA
  misc_feature 6: note = RNA
  misc_feature 7: note = DNA
  misc_feature 8..23: note = RNA
tgataatttcattaatcaccacg

SEQ ID NO: 1332 - RNA, 23 nt, synthetic construct
  source 1..23: mol_type = other RNA
  modified_base 1: mod_base = OTHER; note = Vinyl-phosphonate 2'-O-methyluridine-3'-phosphorothioate
  modified_base 2: mod_base = OTHER; note = 2'-fluoroguanosine-3'-phosphorothioate
  modified_base 3: mod_base = OTHER; note = 2'-O-methyladenosine-3'-phosphate
  modified_base 4: mod_base = OTHER; note = 2'-O-methyluridine-3'-phosphate
  modified_base 5: mod_base = OTHER; note = 2'-O-methyladenosine-3'-phosphate
  modified_base 6: mod_base = OTHER; note = 2'-fluoroadenosine-3'-phosphate
  modified_base 7: mod_base = OTHER; note = 2'-O-methyluridine-3'-phosphate
  modified_base 8: mod_base = OTHER; note = 2'-fluorouridine-3'-phosphate
  modified_base 9: mod_base = OTHER; note = 2'-fluorouridine-3'-phosphate
  modified_base 10: mod_base = OTHER; note = 2'-O-methylcytidine-3'-phosphate
  modified_base 11: mod_base = OTHER; note = 2'-O-methyladenosine-3'-phosphate
  modified_base 12: mod_base = OTHER; note = 2'-O-methyluridine-3'-phosphate
  modified_base 13: mod_base = OTHER; note = 2'-O-methyluridine-3'-phosphate
  modified_base 14: mod_base = OTHER; note = 2'-fluoroadenosine-3'-phosphate
  modified_base 15: mod_base = OTHER; note = 2'-O-methyladenosine-3'-phosphate
  modified_base 16: mod_base = OTHER; note = 2'-fluorouridine-3'-phosphate
  modified_base 17: mod_base = OTHER; note = 2'-O-methylcytidine-3'-phosphate
  modified_base 18: mod_base = OTHER; note = 2'-O-methyladenosine-3'-phosphate
  modified_base 19: mod_base = OTHER; note = 2'-O-methylcytidine-3'-phosphate
  modified_base 20: mod_base = OTHER; note = 2'-O-methylcytidine-3'-phosphate
  modified_base 21: mod_base = OTHER; note = 2'-O-methyladenosine-3'- phosphorothioate
  modified_base 22: mod_base = OTHER; note = 2'-O-methylcytidine-3'- phosphorothioate
  modified_base 23: mod_base = OTHER; note = 2'-O-methylguanosine-3'-phosphate
tgataatttcattaatcaccacg

SEQ ID NO: 1333 - DNA, 23 bp, synthetic construct
  source 1..23: mol_type = other DNA
  modified_base 1: mod_base = OTHER; note = Vinyl-phosphonate 2'-O-methyluridine-3'-phosphorothioate
  modified_base 2: mod_base = OTHER; note = 2'-deoxyguanosine-3'-phosphorothioate
  modified_base 3: mod_base = OTHER; note = 2'-O-methyladenosine-3'-phosphate
  modified_base 4: mod_base = OTHER; note = 2'-O-methyluridine-3'-phosphate
  modified_base 6: mod_base = OTHER; note = 2'-O-methyladenosine-3'-phosphate
  modified_base 8: mod_base = OTHER; note = 2'-O-methyluridine-3'-phosphate
  modified_base 9: mod_base = OTHER; note = 2'-O-methyluridine-3'-phosphate
  modified_base 10: mod_base = OTHER; note = 2'-O-methylcytidine-3'-phosphate
  modified_base 11: mod_base = OTHER; note = 2'-O-methyladenosine-3'-phosphate
  modified_base 13: mod_base = OTHER; note = 2'-O-methyluridine-3'-phosphate
  modified_base 14: mod_base = OTHER; note = 2'-fluoroadenosine-3'-phosphate
  modified_base 15: mod_base = OTHER; note = 2'-O-methyladenosine-3'-phosphate
  modified_base 16: mod_base = OTHER; note = 2'-O-methyluridine-3'-phosphate
  modified_base 17: mod_base = OTHER; note = 2'-O-methylcytidine-3'-phosphate
  modified_base 18: mod_base = OTHER; note = 2'-O-methyladenosine-3'-phosphate
  modified_base 19: mod_base = OTHER; note = 2'-O-methylcytidine-3'-phosphate
  modified_base 20: mod_base = OTHER; note = 2'-O-methylcytidine-3'-phosphate
  modified_base 21: mod_base = OTHER; note = 2'-O-methyladenosine-3'- phosphorothioate
  modified_base 22: mod_base = OTHER; note = 2'-O-methylcytidine-3'- phosphorothioate
  modified_base 23: mod_base = OTHER; note = 2'-O-methylguanosine-3'-phosphate
  misc_feature 1: note = RNA
  misc_feature 2: note = DNA
  misc_feature 3..4: note = RNA
  misc_feature 5: note = DNA
  misc_feature 6: note = RNA
  misc_feature 7: note = DNA
  misc_feature 8..11: note = RNA
  misc_feature 12: note = DNA
  misc_feature 13..23: note = RNA
tgataatttcattaatcaccacg

SEQ ID NO: 1334 - DNA, 23 bp, synthetic construct
  source 1..23: mol_type = other DNA
  modified_base 1: mod_base = OTHER; note = Vinyl-phosphonate 2'-O-methyluridine-3'-phosphorothioate
  modified_base 2: mod_base = OTHER; note = 2'-fluoroadenosine-3'-phosphorothioate
  modified_base 3: mod_base = OTHER; note = 2'-O-methylguanosine-3'-phosphate
  modified_base 4: mod_base = OTHER; note = 2'-O-methylcytidine-3'-phosphate
  modified_base 6: mod_base = OTHER; note = 2'-O-methylguanosine-3'-phosphate
  modified_base 7: mod_base = OTHER; note = cytidine-2'-phosphate
  modified_base 8: mod_base = OTHER; note = 2'-O-methyladenosine-3'-phosphate
  modified_base 9: mod_base = OTHER; note = 2'-O-methylguanosine-3'-phosphate
  modified_base 10: mod_base = OTHER; note = 2'-O-methylcytidine-3'-phosphate
  modified_base 11: mod_base = OTHER; note = 2'-O-methylguanosine-3'-phosphate
  modified_base 12: mod_base = OTHER; note = 2'-O-methylguanosine-3'-phosphate
  modified_base 13: mod_base = OTHER; note = 2'-O-methylguanosine-3'-phosphate
  modified_base 14: mod_base = OTHER; note = 2'-fluorocytidine-3'-phosphate
  modified_base 15: mod_base = OTHER; note = 2'-O-methylcytidine-3'-phosphate
  modified_base 16: mod_base = OTHER; note = 2'-fluorocytidine-3'-phosphate
  modified_base 17: mod_base = OTHER; note = 2'-O-methyladenosine-3'-phosphate
  modified_base 18: mod_base = OTHER; note = 2'-O-methyladenosine-3'-phosphate
  modified_base 19: mod_base = OTHER; note = 2'-O-methyladenosine-3'-phosphate
  modified_base 20: mod_base = OTHER; note = 2'-O-methylcytidine-3'-phosphate
  modified_base 21: mod_base = OTHER; note = 2'-O-methyluridine-3'-phosphorothioate
  modified_base 22: mod_base = OTHER; note = 2'-O-methylcytidine-3'- phosphorothioate
  modified_base 23: mod_base = OTHER; note = 2'-O-methyladenosine-3'-phosphate
  misc_feature 1..4: note = RNA
  misc_feature 5: note = DNA
  misc_feature 6..23: note = RNA
tagctgcagcgggcccaaactca

SEQ ID NO: 1335 - DNA, 23 bp, synthetic construct
  source 1..23: mol_type = other DNA
  modified_base 1: mod_base = OTHER; note = Vinyl-phosphonate 2'-O-methyluridine-3'-phosphorothioate
  modified_base 2: mod_base = OTHER; note = 2'-fluoroadenosine-3'-phosphorothioate
  modified_base 3: mod_base = OTHER; note = 2'-O-methylguanosine-3'-phosphate
  modified_base 4: mod_base = OTHER; note = 2'-O-methylguanosine-3'-phosphate
  modified_base 6: mod_base = OTHER; note = 2'-O-methyluridine-3'-phosphate
  modified_base 7: mod_base = OTHER; note = guanosine-2'-phosphate
  modified_base 8: mod_base = OTHER; note = 2'-O-methylcytidine-3'-phosphate
  modified_base 9: mod_base = OTHER; note = 2'-O-methyladenosine-3'-phosphate
  modified_base 10: mod_base = OTHER; note = 2'-O-methylguanosine-3'-phosphate
  modified_base 11: mod_base = OTHER; note = 2'-O-methylguanosine-3'-phosphate
  modified_base 12: mod_base = OTHER; note = 2'-O-methylguanosine-3'-phosphate
  modified_base 13: mod_base = OTHER; note = 2'-O-methyluridine-3'-phosphate
  modified_base 14: mod_base = OTHER; note = 2'-fluorouridine-3'-phosphate
  modified_base 15: mod_base = OTHER; note = 2'-O-methyladenosine-3'-phosphate
  modified_base 16: mod_base = OTHER; note = 2'-fluorocytidine-3'-phosphate
  modified_base 17: mod_base = OTHER; note = 2'-O-methylcytidine-3'-phosphate
  modified_base 18: mod_base = OTHER; note = 2'-O-methylguanosine-3'-phosphate
  modified_base 19: mod_base = OTHER; note = 2'-O-methylcytidine-3'-phosphate
  modified_base 20: mod_base = OTHER; note = 2'-O-methylcytidine-3'-phosphate
  modified_base 21: mod_base = OTHER; note = 2'-O-methyladenosine-3'- phosphorothioate
  modified_base 22: mod_base = OTHER; note = 2'-O-methyluridine-3'-phosphorothioate
  modified_base 23: mod_base = OTHER; note = 2'-O-methylcytidine-3'-phosphate
  misc_feature 1..4: note = RNA
  misc_feature 5: note = DNA
  misc_feature 6..23: note = RNA
taggctgcagggttaccgccatc

SEQ ID NO: 1336 - DNA, 23 bp, synthetic construct
  source 1..23: mol_type = other DNA
  modified_base 1: mod_base = OTHER; note = Vinyl-phosphonate 2'-O-methyluridine-3'-phosphorothioate
  modified_base 2: mod_base = OTHER; note = 2'-fluoroguanosine-3'-phosphorothioate
  modified_base 3: mod_base = OTHER; note = 2'-O-methylcytidine-3'-phosphate
  modified_base 4: mod_base = OTHER; note = 2'-O-methyluridine-3'-phosphate
  modified_base 6: mod_base = OTHER; note = 2'-O-methylguanosine-3'-phosphate
  modified_base 7: mod_base = OTHER; note = guanosine-2'-phosphate
  modified_base 8: mod_base = OTHER; note = 2'-O-methyluridine-3'-phosphate
  modified_base 9: mod_base = OTHER; note = 2'-O-methylcytidine-3'-phosphate
  modified_base 10: mod_base = OTHER; note = 2'-O-methyladenosine-3'-phosphate
  modified_base 11: mod_base = OTHER; note = 2'-O-methylcytidine-3'-phosphate
  modified_base 12: mod_base = OTHER; note = 2'-O-methyluridine-3'-phosphate
  modified_base 13: mod_base = OTHER; note = 2'-O-methylcytidine-3'-phosphate
  modified_base 14: mod_base = OTHER; note = 2'-fluorouridine-3'-phosphate
  modified_base 15: mod_base = OTHER; note = 2'-O-methylguanosine-3'-phosphate
  modified_base 16: mod_base = OTHER; note = 2'-fluorouridine-3'-phosphate
  modified_base 17: mod_base = OTHER; note = 2'-O-methylcytidine-3'-phosphate
  modified_base 18: mod_base = OTHER; note = 2'-O-methyluridine-3'-phosphate
  modified_base 19: mod_base = OTHER; note = 2'-O-methylcytidine-3'-phosphate
  modified_base 20: mod_base = OTHER; note = 2'-O-methyluridine-3'-phosphate
  modified_base 21: mod_base = OTHER; note = 2'-O-methylguanosine-3'- phosphorothioate
  modified_base 22: mod_base = OTHER; note = 2'-O-methylcytidine-3'- phosphorothioate
  modified_base 23: mod_base = OTHER; note = 2'-O-methylguanosine-3'-phosphate
  misc_feature 1..4: note = RNA
  misc_feature 5: note = DNA
  misc_feature 6..23: note = RNA
tgctgggtcactctgtctctgcg

SEQ ID NO: 1337 - DNA, 23 bp, synthetic construct
  source 1..23: mol_type = other DNA
  modified_base 1: mod_base = OTHER; note = Vinyl-phosphonate 2'-O-methyluridine-3'-phosphorothioate
  modified_base 2: mod_base = OTHER; note = 2'-fluorouridine -3'-phosphorothioate
  modified_base 3: mod_base = OTHER; note = 2'-O-methylguanosine-3'-phosphate
  modified_base 4: mod_base = OTHER; note = 2'-O-methylcytidine-3'-phosphate
  modified_base 6: mod_base = OTHER; note = 2'-O-methylguanosine-3'-phosphate
  modified_base 7: mod_base = OTHER; note = guanosine-2'-phosphate
  modified_base 8: mod_base = OTHER; note = 2'-O-methylguanosine-3'-phosphate
  modified_base 9: mod_base = OTHER; note = 2'-O-methyluridine-3'-phosphate
  modified_base 10: mod_base = OTHER; note = 2'-O-methylcytidine-3'-phosphate
  modified_base 11: mod_base = OTHER; note = 2'-O-methyladenosine-3'-phosphate
  modified_base 12: mod_base = OTHER; note = 2'-O-methylcytidine-3'-phosphate
  modified_base 13: mod_base = OTHER; note = 2'-O-methyluridine-3'-phosphate
  modified_base 14: mod_base = OTHER; note = 2'-fluorocytidine-3'-phosphate
  modified_base 15: mod_base = OTHER; note = 2'-O-methyluridine-3'-phosphate
  modified_base 16: mod_base = OTHER; note = 2'-fluoroguanosine-3'-phosphate
  modified_base 17: mod_base = OTHER; note = 2'-O-methyluridine-3'-phosphate
  modified_base 18: mod_base = OTHER; note = 2'-O-methylcytidine-3'-phosphate
  modified_base 19: mod_base = OTHER; note = 2'-O-methyluridine-3'-phosphate
  modified_base 20: mod_base = OTHER; note = 2'-O-methylcytidine-3'-phosphate
  modified_base 21: mod_base = OTHER; note = 2'-O-methyluridine-3'-phosphorothioate
  modified_base 22: mod_base = OTHER; note = 2'-O-methylguanosine-3'- phosphorothioate
  modified_base 23: mod_base = OTHER; note = 2'-O-methylcytidine-3'-phosphate
  misc_feature 1..4: note = RNA
  misc_feature 5: note = DNA
  misc_feature 6..23: note = RNA
ttgctgggtcactctgtctctgc

SEQ ID NO: 1338 - DNA, 23 bp, synthetic construct
  source 1..23: mol_type = other DNA
  modified_base 1: mod_base = OTHER; note = Vinyl-phosphonate 2'-O-methyluridine-3'-phosphorothioate
  modified_base 2: mod_base = OTHER; note = 2'-fluorouridine -3'-phosphorothioate
  modified_base 3: mod_base = OTHER; note = 2'-O-methyluridine-3'-phosphate
  modified_base 4: mod_base = OTHER; note = 2'-O-methylguanosine-3'-phosphate
  modified_base 6: mod_base = OTHER; note = 2'-O-methyluridine-3'-phosphate
  modified_base 7: mod_base = OTHER; note = guanosine-2'-phosphate
  modified_base 8: mod_base = OTHER; note = 2'-O-methylguanosine-3'-phosphate
  modified_base 9: mod_base = OTHER; note = 2'-O-methylguanosine-3'-phosphate
  modified_base 10: mod_base = OTHER; note = 2'-O-methyluridine-3'-phosphate
  modified_base 11: mod_base = OTHER; note = 2'-O-methylcytidine-3'-phosphate
  modified_base 12: mod_base = OTHER; note = 2'-O-methyladenosine-3'-phosphate
  modified_base 13: mod_base = OTHER; note = 2'-O-methylcytidine-3'-phosphate
  modified_base 14: mod_base = OTHER; note = 2'-fluorouridine-3'-phosphate
  modified_base 15: mod_base = OTHER; note = 2'-O-methylcytidine-3'-phosphate
  modified_base 16: mod_base = OTHER; note = 2'-fluorouridine-3'-phosphate
  modified_base 17: mod_base = OTHER; note = 2'-O-methylguanosine-3'-phosphate
  modified_base 18: mod_base = OTHER; note = 2'-O-methyluridine-3'-phosphate
  modified_base 19: mod_base = OTHER; note = 2'-O-methylcytidine-3'-phosphate
  modified_base 20: mod_base = OTHER; note = 2'-O-methyluridine-3'-phosphate
  modified_base 21: mod_base = OTHER; note = 2'-O-methylcytidine-3'- phosphorothioate
  modified_base 22: mod_base = OTHER; note = 2'-O-methyluridine-3'-phosphorothioate
  modified_base 23: mod_base = OTHER; note = 2'-O-methylguanosine-3'-phosphate
  misc_feature 1..4: note = RNA
  misc_feature 5: note = DNA
  misc_feature 6..23: note = RNA
tttgctgggtcactctgtctctg

SEQ ID NO: 1339 - DNA, 23 bp, synthetic construct
  source 1..23: mol_type = other DNA
  modified_base 1: mod_base = OTHER; note = Vinyl-phosphonate 2'-O-methyluridine-3'-phosphorothioate
  modified_base 2: mod_base = OTHER; note = 2'-fluoroguanosine-3'-phosphorothioate
  modified_base 3: mod_base = OTHER; note = 2'-O-methylguanosine-3'-phosphate
  modified_base 4: mod_base = OTHER; note = 2'-O-methyluridine-3'-phosphate
  modified_base 6: mod_base = OTHER; note = 2'-O-methylguanosine-3'-phosphate
  modified_base 7: mod_base = OTHER; note = cytidine-2'-phosphate
  modified_base 8: mod_base = OTHER; note = 2'-O-methyluridine-3'-phosphate
  modified_base 9: mod_base = OTHER; note = 2'-O-methylguanosine-3'-phosphate
  modified_base 10: mod_base = OTHER; note = 2'-O-methylguanosine-3'-phosphate
  modified_base 11: mod_base = OTHER; note = 2'-O-methylguanosine-3'-phosphate
  modified_base 12: mod_base = OTHER; note = 2'-O-methyluridine-3'-phosphate
  modified_base 13: mod_base = OTHER; note = 2'-O-methylcytidine-3'-phosphate
  modified_base 14: mod_base = OTHER; note = 2'-fluoroadenosine-3'-phosphate
  modified_base 15: mod_base = OTHER; note = 2'-O-methylcytidine-3'-phosphate
  modified_base 16: mod_base = OTHER; note = 2'-fluorouridine-3'-phosphate
  modified_base 17: mod_base = OTHER; note = 2'-O-methylcytidine-3'-phosphate
  modified_base 18: mod_base = OTHER; note = 2'-O-methyluridine-3'-phosphate
  modified_base 19: mod_base = OTHER; note = 2'-O-methylguanosine-3'-phosphate
  modified_base 20: mod_base = OTHER; note = 2'-O-methyluridine-3'-phosphate
  modified_base 21: mod_base = OTHER; note = 2'-O-methylcytidine-3'- phosphorothioate
  modified_base 22: mod_base = OTHER; note = 2'-O-methyluridine-3'-phosphorothioate
  modified_base 23: mod_base = OTHER; note = 2'-O-methylcytidine-3'-phosphate
  misc_feature 1..4: note = RNA
  misc_feature 5: note = DNA
  misc_feature 6..23: note = RNA
tggttgctgggtcactctgtctc

SEQ ID NO: 1340 - DNA, 23 bp, synthetic construct
  source 1..23: mol_type = other DNA
  modified_base 1: mod_base = OTHER; note = Vinyl-phosphonate 2'-O-methyluridine-3'-phosphorothioate
  modified_base 2: mod_base = OTHER; note = 2'-fluoroguanosine-3'-phosphorothioate
  modified_base 3: mod_base = OTHER; note = 2'-O-methylguanosine-3'-phosphate
  modified_base 4: mod_base = OTHER; note = 2'-O-methylguanosine-3'-phosphate
  modified_base 6: mod_base = OTHER; note = 2'-O-methyluridine-3'-phosphate
  modified_base 7: mod_base = OTHER; note = guanosine-2'-phosphate
  modified_base 8: mod_base = OTHER; note = 2'-O-methylcytidine-3'-phosphate
  modified_base 9: mod_base = OTHER; note = 2'-O-methyluridine-3'-phosphate
  modified_base 10: mod_base = OTHER; note = 2'-O-methylguanosine-3'-phosphate
  modified_base 11: mod_base = OTHER; note = 2'-O-methylguanosine-3'-phosphate
  modified_base 12: mod_base = OTHER; note = 2'-O-methylguanosine-3'-phosphate
  modified_base 13: mod_base = OTHER; note = 2'-O-methyluridine-3'-phosphate
  modified_base 14: mod_base = OTHER; note = 2'-fluorocytidine-3'-phosphate
  modified_base 15: mod_base = OTHER; note = 2'-O-methyladenosine-3'-phosphate
  modified_base 16: mod_base = OTHER; note = 2'-fluorocytidine-3'-phosphate
  modified_base 17: mod_base = OTHER; note = 2'-O-methyluridine-3'-phosphate
  modified_base 18: mod_base = OTHER; note = 2'-O-methylcytidine-3'-phosphate
  modified_base 19: mod_base = OTHER; note = 2'-O-methyluridine-3'-phosphate
  modified_base 20: mod_base = OTHER; note = 2'-O-methylguanosine-3'-phosphate
  modified_base 21: mod_base = OTHER; note = 2'-O-methyluridine-3'-phosphorothioate
  modified_base 22: mod_base = OTHER; note = 2'-O-methylcytidine-3'- phosphorothioate
  modified_base 23: mod_base = OTHER; note = 2'-O-methyluridine-3'-phosphate
  misc_feature 1..4: note = RNA
  misc_feature 5: note = DNA
  misc_feature 6..23: note = RNA
tgggttgctgggtcactctgtct

SEQ ID NO: 1341 - DNA, 23 bp, synthetic construct
  source 1..23: mol_type = other DNA
  modified_base 1: mod_base = OTHER; note = Vinyl-phosphonate 2'-O-methyluridine-3'-phosphorothioate
  modified_base 2: mod_base = OTHER; note = 2'-fluorouridine -3'-phosphorothioate
  modified_base 3: mod_base = OTHER; note = 2'-O-methylcytidine-3'-phosphate
  modified_base 4: mod_base = OTHER; note = 2'-O-methyluridine-3'-phosphate
  modified_base 6: mod_base = OTHER; note = 2'-O-methylguanosine-3'-phosphate
  modified_base 7: mod_base = OTHER; note = guanosine-2'-phosphate
  modified_base 8: mod_base = OTHER; note = 2'-O-methyluridine-3'-phosphate
  modified_base 9: mod_base = OTHER; note = 2'-O-methyluridine-3'-phosphate
  modified_base 10: mod_base = OTHER; note = 2'-O-methylguanosine-3'-phosphate
  modified_base 11: mod_base = OTHER; note = 2'-O-methylcytidine-3'-phosphate
  modified_base 12: mod_base = OTHER; note = 2'-O-methyluridine-3'-phosphate
  modified_base 13: mod_base = OTHER; note = 2'-O-methylguanosine-3'-phosphate
  modified_base 14: mod_base = OTHER; note = 2'-fluoroguanosine-3'-phosphate
  modified_base 15: mod_base = OTHER; note = 2'-O-methylguanosine-3'-phosphate
  modified_base 16: mod_base = OTHER; note = 2'-fluorouridine-3'-phosphate
  modified_base 17: mod_base = OTHER; note = 2'-O-methylcytidine-3'-phosphate
  modified_base 18: mod_base = OTHER; note = 2'-O-methyladenosine-3'-phosphate
  modified_base 19: mod_base = OTHER; note = 2'-O-methylcytidine-3'-phosphate
  modified_base 20: mod_base = OTHER; note = 2'-O-methyluridine-3'-phosphate
  modified_base 21: mod_base = OTHER; note = 2'-O-methylcytidine-3'- phosphorothioate
  modified_base 22: mod_base = OTHER; note = 2'-O-methyluridine-3'-phosphorothioate
  modified_base 23: mod_base = OTHER; note = 2'-O-methylguanosine-3'-phosphate
  misc_feature 1..4: note = RNA
  misc_feature 5: note = DNA
  misc_feature 6..23: note = RNA
ttctgggttgctgggtcactctg

SEQ ID NO: 1342 - DNA, 23 bp, synthetic construct
  source 1..23: mol_type = other DNA
  modified_base 1: mod_base = OTHER; note = Vinyl-phosphonate 2'-O-methyluridine-3'-phosphorothioate
  modified_base 2: mod_base = OTHER; note = 2'-fluorocytidine-3'-phosphorothioate
  modified_base 3: mod_base = OTHER; note = 2'-O-methyluridine-3'-phosphate
  modified_base 4: mod_base = OTHER; note = 2'-O-methylcytidine-3'-phosphate
  modified_base 6: mod_base = OTHER; note = 2'-O-methylguanosine-3'-phosphate
  modified_base 7: mod_base = OTHER; note = guanosine-2'-phosphate
  modified_base 8: mod_base = OTHER; note = 2'-O-methylguanosine-3'-phosphate
  modified_base 9: mod_base = OTHER; note = 2'-O-methyluridine-3'-phosphate
  modified_base 10: mod_base = OTHER; note = 2'-O-methyluridine-3'-phosphate
  modified_base 11: mod_base = OTHER; note = 2'-O-methylguanosine-3'-phosphate
  modified_base 12: mod_base = OTHER; note = 2'-O-methylcytidine-3'-phosphate
  modified_base 13: mod_base = OTHER; note = 2'-O-methyluridine-3'-phosphate
  modified_base 14: mod_base = OTHER; note = 2'-fluoroguanosine-3'-phosphate
  modified_base 15: mod_base = OTHER; note = 2'-O-methylguanosine-3'-phosphate
  modified_base 16: mod_base = OTHER; note = 2'-fluoroguanosine-3'-phosphate
  modified_base 17: mod_base = OTHER; note = 2'-O-methyluridine-3'-phosphate
  modified_base 18: mod_base = OTHER; note = 2'-O-methylcytidine-3'-phosphate
  modified_base 19: mod_base = OTHER; note = 2'-O-methyladenosine-3'-phosphate
  modified_base 20: mod_base = OTHER; note = 2'-O-methylcytidine-3'-phosphate
  modified_base 21: mod_base = OTHER; note = 2'-O-methyluridine-3'-phosphorothioate
  modified_base 22: mod_base = OTHER; note = 2'-O-methylcytidine-3'- phosphorothioate
  modified_base 23: mod_base = OTHER; note = 2'-O-methyluridine-3'-phosphate
  misc_feature 1..4: note = RNA
  misc_feature 5: note = DNA
  misc_feature 6..23: note = RNA
tctctgggttgctgggtcactct

SEQ ID NO: 1343 - DNA, 23 bp, synthetic construct
  source 1..23: mol_type = other DNA
  modified_base 1: mod_base = OTHER; note = Vinyl-phosphonate 2'-O-methyluridine-3'-phosphorothioate
  modified_base 2: mod_base = OTHER; note = 2'-fluorocytidine-3'-phosphorothioate
  modified_base 3: mod_base = OTHER; note = 2'-O-methyluridine-3'-phosphate
  modified_base 4: mod_base = OTHER; note = 2'-O-methylcytidine-3'-phosphate
  modified_base 6: mod_base = OTHER; note = 2'-O-methyluridine-3'-phosphate
  modified_base 7: mod_base = OTHER; note = guanosine-2'-phosphate
  modified_base 8: mod_base = OTHER; note = 2'-O-methylguanosine-3'-phosphate
  modified_base 9: mod_base = OTHER; note = 2'-O-methylguanosine-3'-phosphate
  modified_base 10: mod_base = OTHER; note = 2'-O-methylcytidine-3'-phosphate
  modified_base 11: mod_base = OTHER; note = 2'-O-methyluridine-3'-phosphate
  modified_base 12: mod_base = OTHER; note = 2'-O-methylcytidine-3'-phosphate
  modified_base 13: mod_base = OTHER; note = 2'-O-methyluridine-3'-phosphate
  modified_base 14: mod_base = OTHER; note = 2'-fluoroguanosine-3'-phosphate
  modified_base 15: mod_base = OTHER; note = 2'-O-methylguanosine-3'-phosphate
  modified_base 16: mod_base = OTHER; note = 2'-fluoroguanosine-3'-phosphate
  modified_base 17: mod_base = OTHER; note = 2'-O-methyluridine-3'-phosphate
  modified_base 18: mod_base = OTHER; note = 2'-O-methyluridine-3'-phosphate
  modified_base 19: mod_base = OTHER; note = 2'-O-methylguanosine-3'-phosphate
  modified_base 20: mod_base = OTHER; note = 2'-O-methylcytidine-3'-phosphate
  modified_base 21: mod_base = OTHER; note = 2'-O-methyluridine-3'-phosphorothioate
  modified_base 22: mod_base = OTHER; note = 2'-O-methylguanosine-3'- phosphorothioate
  modified_base 23: mod_base = OTHER; note = 2'-O-methylguanosine-3'-phosphate
  misc_feature 1..4: note = RNA
  misc_feature 5: note = DNA
  misc_feature 6..23: note = RNA
tctcatgggctctgggttgctgg

SEQ ID NO: 1344 - DNA, 23 bp, synthetic construct
  source 1..23: mol_type = other DNA
  modified_base 1: mod_base = OTHER; note = Vinyl-phosphonate 2'-O-methyluridine-3'-phosphorothioate
  modified_base 2: mod_base = OTHER; note = 2'-fluorouridine -3'-phosphorothioate
  modified_base 3: mod_base = OTHER; note = 2'-O-methylcytidine-3'-phosphate
  modified_base 4: mod_base = OTHER; note = 2'-O-methylcytidine-3'-phosphate
  modified_base 6: mod_base = OTHER; note = 2'-O-methyluridine-3'-phosphate
  modified_base 7: mod_base = OTHER; note = cytidine-2'-phosphate
  modified_base 8: mod_base = OTHER; note = 2'-O-methyladenosine-3'-phosphate
  modified_base 9: mod_base = OTHER; note = 2'-O-methyluridine-3'-phosphate
  modified_base 10: mod_base = OTHER; note = 2'-O-methylguanosine-3'-phosphate
  modified_base 11: mod_base = OTHER; note = 2'-O-methylguanosine-3'-phosphate
  modified_base 12: mod_base = OTHER; note = 2'-O-methylguanosine-3'-phosphate
  modified_base 13: mod_base = OTHER; note = 2'-O-methylcytidine-3'-phosphate
  modified_base 14: mod_base = OTHER; note = 2'-fluorouridine-3'-phosphate
  modified_base 15: mod_base = OTHER; note = 2'-O-methylcytidine-3'-phosphate
  modified_base 16: mod_base = OTHER; note = 2'-fluorouridine-3'-phosphate
  modified_base 17: mod_base = OTHER; note = 2'-O-methylguanosine-3'-phosphate
  modified_base 18: mod_base = OTHER; note = 2'-O-methylguanosine-3'-phosphate
  modified_base 19: mod_base = OTHER; note = 2'-O-methylguanosine-3'-phosphate
  modified_base 20: mod_base = OTHER; note = 2'-O-methyluridine-3'-phosphate
  modified_base 21: mod_base = OTHER; note = 2'-O-methyluridine-3'-phosphorothioate
  modified_base 22: mod_base = OTHER; note = 2'-O-methylguanosine-3'- phosphorothioate
  modified_base 23: mod_base = OTHER; note = 2'-O-methylcytidine-3'-phosphate
  misc_feature 1..4: note = RNA
  misc_feature 5: note = DNA
  misc_feature 6..23: note = RNA
ttccctcatgggctctgggttgc

SEQ ID NO: 1345 - DNA, 23 bp, synthetic construct
  source 1..23: mol_type = other DNA
  modified_base 1: mod_base = OTHER; note = Vinyl-phosphonate 2'-O-methyluridine-3'-phosphorothioate
  modified_base 2: mod_base = OTHER; note = 2'-fluorouridine -3'-phosphorothioate
  modified_base 3: mod_base = OTHER; note = 2'-O-methylguanosine-3'-phosphate
  modified_base 4: mod_base = OTHER; note = 2'-O-methyluridine-3'-phosphate
  modified_base 6: mod_base = OTHER; note = 2'-O-methylcytidine-3'-phosphate
  modified_base 7: mod_base = OTHER; note = cytidine-2'-phosphate
  modified_base 8: mod_base = OTHER; note = 2'-O-methyluridine-3'-phosphate
  modified_base 9: mod_base = OTHER; note = 2'-O-methylcytidine-3'-phosphate
  modified_base 10: mod_base = OTHER; note = 2'-O-methyladenosine-3'-phosphate
  modified_base 11: mod_base = OTHER; note = 2'-O-methyluridine-3'-phosphate
  modified_base 12: mod_base = OTHER; note = 2'-O-methylguanosine-3'-phosphate
  modified_base 13: mod_base = OTHER; note = 2'-O-methylguanosine-3'-phosphate
  modified_base 14: mod_base = OTHER; note = 2'-fluoroguanosine-3'-phosphate
  modified_base 15: mod_base = OTHER; note = 2'-O-methylcytidine-3'-phosphate
  modified_base 16: mod_base = OTHER; note = 2'-fluorouridine-3'-phosphate
  modified_base 17: mod_base = OTHER; note = 2'-O-methylcytidine-3'-phosphate
  modified_base 18: mod_base = OTHER; note = 2'-O-methyluridine-3'-phosphate
  modified_base 19: mod_base = OTHER; note = 2'-O-methylguanosine-3'-phosphate
  modified_base 20: mod_base = OTHER; note = 2'-O-methylguanosine-3'-phosphate
  modified_base 21: mod_base = OTHER; note = 2'-O-methylguanosine-3'- phosphorothioate
  modified_base 22: mod_base = OTHER; note = 2'-O-methyluridine-3'-phosphorothioate
  modified_base 23: mod_base = OTHER; note = 2'-O-methyluridine-3'-phosphate
  misc_feature 1..4: note = RNA
  misc_feature 5: note = DNA
  misc_feature 6..23: note = RNA
ttgtccctcatgggctctgggtt

SEQ ID NO: 1346 - DNA, 23 bp, synthetic construct
  source 1..23: mol_type = other DNA
  modified_base 1: mod_base = OTHER; note = Vinyl-phosphonate 2'-O-methyluridine-3'-phosphorothioate
  modified_base 2: mod_base = OTHER; note = 2'-fluoroguanosine-3'-phosphorothioate
  modified_base 3: mod_base = OTHER; note = 2'-O-methyluridine-3'-phosphate
  modified_base 4: mod_base = OTHER; note = 2'-O-methylguanosine-3'-phosphate
  modified_base 6: mod_base = OTHER; note = 2'-O-methylcytidine-3'-phosphate
  modified_base 7: mod_base = OTHER; note = cytidine-2'-phosphate
  modified_base 8: mod_base = OTHER; note = 2'-O-methylcytidine-3'-phosphate
  modified_base 9: mod_base = OTHER; note = 2'-O-methyluridine-3'-phosphate
  modified_base 10: mod_base = OTHER; note = 2'-O-methylcytidine-3'-phosphate
  modified_base 11: mod_base = OTHER; note = 2'-O-methyladenosine-3'-phosphate
  modified_base 12: mod_base = OTHER; note = 2'-O-methyluridine-3'-phosphate
  modified_base 13: mod_base = OTHER; note = 2'-O-methylguanosine-3'-phosphate
  modified_base 14: mod_base = OTHER; note = 2'-fluoroguanosine-3'-phosphate
  modified_base 15: mod_base = OTHER; note = 2'-O-methylguanosine-3'-phosphate
  modified_base 16: mod_base = OTHER; note = 2'-fluorocytidine-3'-phosphate
  modified_base 17: mod_base = OTHER; note = 2'-O-methyluridine-3'-phosphate
  modified_base 18: mod_base = OTHER; note = 2'-O-methylcytidine-3'-phosphate
  modified_base 19: mod_base = OTHER; note = 2'-O-methyluridine-3'-phosphate
  modified_base 20: mod_base = OTHER; note = 2'-O-methylguanosine-3'-phosphate
  modified_base 21: mod_base = OTHER; note = 2'-O-methylguanosine-3'- phosphorothioate
  modified_base 22: mod_base = OTHER; note = 2'-O-methylguanosine-3'- phosphorothioate
  modified_base 23: mod_base = OTHER; note = 2'-O-methyluridine-3'-phosphate
  misc_feature 1..4: note = RNA
  misc_feature 5: note = DNA
  misc_feature 6..23: note = RNA
tgtgtccctcatgggctctgggt

SEQ ID NO: 1347 - DNA, 23 bp, synthetic construct
  source 1..23: mol_type = other DNA
  modified_base 1: mod_base = OTHER; note = Vinyl-phosphonate 2'-O-methyluridine-3'-phosphorothioate
  modified_base 2: mod_base = OTHER; note = 2'-fluoroadenosine-3'-phosphorothioate
  modified_base 3: mod_base = OTHER; note = 2'-O-methyladenosine-3'-phosphate
  modified_base 4: mod_base = OTHER; note = 2'-O-methylguanosine-3'-phosphate
  modified_base 6: mod_base = OTHER; note = 2'-O-methylcytidine-3'-phosphate
  modified_base 7: mod_base = OTHER; note = cytidine-2'-phosphate
  modified_base 8: mod_base = OTHER; note = 2'-O-methylcytidine-3'-phosphate
  modified_base 9: mod_base = OTHER; note = 2'-O-methyladenosine-3'-phosphate
  modified_base 10: mod_base = OTHER; note = 2'-O-methyladenosine-3'-phosphate
  modified_base 11: mod_base = OTHER; note = 2'-O-methylguanosine-3'-phosphate
  modified_base 12: mod_base = OTHER; note = 2'-O-methyluridine-3'-phosphate
  modified_base 13: mod_base = OTHER; note = 2'-O-methylguanosine-3'-phosphate
  modified_base 14: mod_base = OTHER; note = 2'-fluoroadenosine-3'-phosphate
  modified_base 15: mod_base = OTHER; note = 2'-O-methylguanosine-3'-phosphate
  modified_base 16: mod_base = OTHER; note = 2'-fluoroguanosine-3'-phosphate
  modified_base 17: mod_base = OTHER; note = 2'-O-methylguanosine-3'-phosphate
  modified_base 18: mod_base = OTHER; note = 2'-O-methyladenosine-3'-phosphate
  modified_base 19: mod_base = OTHER; note = 2'-O-methylguanosine-3'-phosphate
  modified_base 20: mod_base = OTHER; note = 2'-O-methylcytidine-3'-phosphate
  modified_base 21: mod_base = OTHER; note = 2'-O-methylguanosine-3'- phosphorothioate
  modified_base 22: mod_base = OTHER; note = 2'-O-methylguanosine-3'- phosphorothioate
  modified_base 23: mod_base = OTHER; note = 2'-O-methylguanosine-3'-phosphate
  misc_feature 1..4: note = RNA
  misc_feature 5: note = DNA
  misc_feature 6..23: note = RNA
taagacccaagtgagggagcggg

SEQ ID NO: 1348 - DNA, 23 bp, synthetic construct
  source 1..23: mol_type = other DNA
  modified_base 1: mod_base = OTHER; note = Vinyl-phosphonate 2'-O-methyluridine-3'-phosphorothioate
  modified_base 2: mod_base = OTHER; note = 2'-fluoroguanosine-3'-phosphorothioate
  modified_base 3: mod_base = OTHER; note = 2'-O-methyladenosine-3'-phosphate
  modified_base 4: mod_base = OTHER; note = 2'-O-methyladenosine-3'-phosphate
  modified_base 6: mod_base = OTHER; note = 2'-O-methyladenosine-3'-phosphate
  modified_base 7: mod_base = OTHER; note = cytidine-2'-phosphate
  modified_base 8: mod_base = OTHER; note = 2'-O-methylcytidine-3'-phosphate
  modified_base 9: mod_base = OTHER; note = 2'-O-methylcytidine-3'-phosphate
  modified_base 10: mod_base = OTHER; note = 2'-O-methyladenosine-3'-phosphate
  modified_base 11: mod_base = OTHER; note = 2'-O-methyladenosine-3'-phosphate
  modified_base 12: mod_base = OTHER; note = 2'-O-methylguanosine-3'-phosphate
  modified_base 13: mod_base = OTHER; note = 2'-O-methyluridine-3'-phosphate
  modified_base 14: mod_base = OTHER; note = 2'-fluoroguanosine-3'-phosphate
  modified_base 15: mod_base = OTHER; note = 2'-O-methyladenosine-3'-phosphate
  modified_base 16: mod_base = OTHER; note = 2'-fluoroguanosine-3'-phosphate
  modified_base 17: mod_base = OTHER; note = 2'-O-methylguanosine-3'-phosphate
  modified_base 18: mod_base = OTHER; note = 2'-O-methylguanosine-3'-phosphate
  modified_base 19: mod_base = OTHER; note = 2'-O-methyladenosine-3'-phosphate
  modified_base 20: mod_base = OTHER; note = 2'-O-methylguanosine-3'-phosphate
  modified_base 21: mod_base = OTHER; note = 2'-O-methylcytidine-3'- phosphorothioate
  modified_base 22: mod_base = OTHER; note = 2'-O-methylguanosine-3'- phosphorothioate
  modified_base 23: mod_base = OTHER; note = 2'-O-methylguanosine-3'-phosphate
  misc_feature 1..4: note = RNA
  misc_feature 5: note = DNA
  misc_feature 6..23: note = RNA
tgaagacccaagtgagggagcgg

SEQ ID NO: 1349 - DNA, 23 bp, synthetic construct
  source 1..23: mol_type = other DNA
  modified_base 1: mod_base = OTHER; note = Vinyl-phosphonate 2'-O-methyluridine-3'-phosphorothioate
  modified_base 2: mod_base = OTHER; note = 2'-fluoroguanosine-3'-phosphorothioate
  modified_base 3: mod_base = OTHER; note = 2'-O-methylguanosine-3'-phosphate
  modified_base 4: mod_base = OTHER; note = 2'-O-methylguanosine-3'-phosphate
  modified_base 6: mod_base = OTHER; note = 2'-O-methyladenosine-3'-phosphate
  modified_base 7: mod_base = OTHER; note = guanosine-2'-phosphate
  modified_base 8: mod_base = OTHER; note = 2'-O-methyladenosine-3'-phosphate
  modified_base 9: mod_base = OTHER; note = 2'-O-methylcytidine-3'-phosphate
  modified_base 10: mod_base = OTHER; note = 2'-O-methylcytidine-3'-phosphate
  modified_base 11: mod_base = OTHER; note = 2'-O-methylcytidine-3'-phosphate
  modified_base 12: mod_base = OTHER; note = 2'-O-methyladenosine-3'-phosphate
  modified_base 13: mod_base = OTHER; note = 2'-O-methyladenosine-3'-phosphate
  modified_base 14: mod_base = OTHER; note = 2'-fluoroguanosine-3'-phosphate
  modified_base 15: mod_base = OTHER; note = 2'-O-methyluridine-3'-phosphate
  modified_base 16: mod_base = OTHER; note = 2'-fluoroguanosine-3'-phosphate
  modified_base 17: mod_base = OTHER; note = 2'-O-methyladenosine-3'-phosphate
  modified_base 18: mod_base = OTHER; note = 2'-O-methylguanosine-3'-phosphate
  modified_base 19: mod_base = OTHER; note = 2'-O-methylguanosine-3'-phosphate
  modified_base 20: mod_base = OTHER; note = 2'-O-methylguanosine-3'-phosphate
  modified_base 21: mod_base = OTHER; note = 2'-O-methyladenosine-3'- phosphorothioate
  modified_base 22: mod_base = OTHER; note = 2'-O-methylguanosine-3'- phosphorothioate
  modified_base 23: mod_base = OTHER; note = 2'-O-methylcytidine-3'-phosphate
  misc_feature 1..4: note = RNA
  misc_feature 5: note = DNA
  misc_feature 6..23: note = RNA
tgggaagacccaagtgagggagc

SEQ ID NO: 1350 - DNA, 23 bp, synthetic construct
  source 1..23: mol_type = other DNA
  modified_base 1: mod_base = OTHER; note = Vinyl-phosphonate 2'-O-methyluridine-3'-phosphorothioate
  modified_base 2: mod_base = OTHER; note = 2'-fluoroadenosine-3'-phosphorothioate
  modified_base 3: mod_base = OTHER; note = 2'-O-methylcytidine-3'-phosphate
  modified_base 4: mod_base = OTHER; note = 2'-O-methyladenosine-3'-phosphate
  modified_base 6: mod_base = OTHER; note = 2'-O-methylguanosine-3'-phosphate
  modified_base 7: mod_base = OTHER; note = guanosine-2'-phosphate
  modified_base 8: mod_base = OTHER; note = 2'-O-methylguanosine-3'-phosphate
  modified_base 9: mod_base = OTHER; note = 2'-O-methyladenosine-3'-phosphate
  modified_base 10: mod_base = OTHER; note = 2'-O-methyladenosine-3'-phosphate
  modified_base 11: mod_base = OTHER; note = 2'-O-methylguanosine-3'-phosphate
  modified_base 12: mod_base = OTHER; note = 2'-O-methyladenosine-3'-phosphate
  modified_base 13: mod_base = OTHER; note = 2'-O-methylcytidine-3'-phosphate
  modified_base 14: mod_base = OTHER; note = 2'-fluorocytidine-3'-phosphate
  modified_base 15: mod_base = OTHER; note = 2'-O-methylcytidine-3'-phosphate
  modified_base 16: mod_base = OTHER; note = 2'-fluoroadenosine-3'-phosphate
  modified_base 17: mod_base = OTHER; note = 2'-O-methyladenosine-3'-phosphate
  modified_base 18: mod_base = OTHER; note = 2'-O-methylguanosine-3'-phosphate
  modified_base 19: mod_base = OTHER; note = 2'-O-methyluridine-3'-phosphate
  modified_base 20: mod_base = OTHER; note = 2'-O-methylguanosine-3'-phosphate
  modified_base 21: mod_base = OTHER; note = 2'-O-methyladenosine-3'- phosphorothioate
  modified_base 22: mod_base = OTHER; note = 2'-O-methylguanosine-3'- phosphorothioate
  modified_base 23: mod_base = OTHER; note = 2'-O-methylguanosine-3'-phosphate
  misc_feature 1..4: note = RNA
  misc_feature 5: note = DNA
  misc_feature 6..23: note = RNA
tacaagggaagacccaagtgagg

SEQ ID NO: 1351 - DNA, 23 bp, synthetic construct
  source 1..23: mol_type = other DNA
  modified_base 1: mod_base = OTHER; note = Vinyl-phosphonate 2'-O-methyluridine-3'-phosphorothioate
  modified_base 2: mod_base = OTHER; note = 2'-fluoroguanosine-3'-phosphorothioate
  modified_base 3: mod_base = OTHER; note = 2'-O-methyladenosine-3'-phosphate
  modified_base 4: mod_base = OTHER; note = 2'-O-methylcytidine-3'-phosphate
  modified_base 6: mod_base = OTHER; note = 2'-O-methyladenosine-3'-phosphate
  modified_base 7: mod_base = OTHER; note = guanosine-2'-phosphate
  modified_base 8: mod_base = OTHER; note = 2'-O-methylguanosine-3'-phosphate
  modified_base 9: mod_base = OTHER; note = 2'-O-methylguanosine-3'-phosphate
  modified_base 10: mod_base = OTHER; note = 2'-O-methyladenosine-3'-phosphate
  modified_base 11: mod_base = OTHER; note = 2'-O-methyladenosine-3'-phosphate
  modified_base 12: mod_base = OTHER; note = 2'-O-methylguanosine-3'-phosphate
  modified_base 13: mod_base = OTHER; note = 2'-O-methyladenosine-3'-phosphate
  modified_base 14: mod_base = OTHER; note = 2'-fluorocytidine-3'-phosphate
  modified_base 15: mod_base = OTHER; note = 2'-O-methylcytidine-3'-phosphate
  modified_base 16: mod_base = OTHER; note = 2'-fluorocytidine-3'-phosphate
  modified_base 17: mod_base = OTHER; note = 2'-O-methyladenosine-3'-phosphate
  modified_base 18: mod_base = OTHER; note = 2'-O-methyladenosine-3'-phosphate
  modified_base 19: mod_base = OTHER; note = 2'-O-methylguanosine-3'-phosphate
  modified_base 20: mod_base = OTHER; note = 2'-O-methyluridine-3'-phosphate
  modified_base 21: mod_base = OTHER; note = 2'-O-methylguanosine-3'- phosphorothioate
  modified_base 22: mod_base = OTHER; note = 2'-O-methyladenosine-3'- phosphorothioate
  modified_base 23: mod_base = OTHER; note = 2'-O-methylguanosine-3'-phosphate
  misc_feature 1..4: note = RNA
  misc_feature 5: note = DNA
  misc_feature 6..23: note = RNA
tgacaagggaagacccaagtgag

SEQ ID NO: 1352 - DNA, 23 bp, synthetic construct
  source 1..23: mol_type = other DNA
  modified_base 1: mod_base = OTHER; note = Vinyl-phosphonate 2'-O-methyluridine-3'-phosphorothioate
  modified_base 2: mod_base = OTHER; note = 2'-fluoroguanosine-3'-phosphorothioate
  modified_base 3: mod_base = OTHER; note = 2'-O-methyladenosine-3'-phosphate
  modified_base 4: mod_base = OTHER; note = 2'-O-methylguanosine-3'-phosphate
  modified_base 6: mod_base = OTHER; note = 2'-O-methyladenosine-3'-phosphate
  modified_base 7: mod_base = OTHER; note = cytidine-2'-phosphate
  modified_base 8: mod_base = OTHER; note = 2'-O-methyladenosine-3'-phosphate
  modified_base 9: mod_base = OTHER; note = 2'-O-methyladenosine-3'-phosphate
  modified_base 10: mod_base = OTHER; note = 2'-O-methylguanosine-3'-phosphate
  modified_base 11: mod_base = OTHER; note = 2'-O-methylguanosine-3'-phosphate
  modified_base 12: mod_base = OTHER; note = 2'-O-methylguanosine-3'-phosphate
  modified_base 13: mod_base = OTHER; note = 2'-O-methyladenosine-3'-phosphate
  modified_base 14: mod_base = OTHER; note = 2'-fluoroadenosine-3'-phosphate
  modified_base 15: mod_base = OTHER; note = 2'-O-methylguanosine-3'-phosphate
  modified_base 16: mod_base = OTHER; note = 2'-fluoroadenosine-3'-phosphate
  modified_base 17: mod_base = OTHER; note = 2'-O-methylcytidine-3'-phosphate
  modified_base 18: mod_base = OTHER; note = 2'-O-methylcytidine-3'-phosphate
  modified_base 19: mod_base = OTHER; note = 2'-O-methylcytidine-3'-phosphate
  modified_base 20: mod_base = OTHER; note = 2'-O-methyladenosine-3'-phosphate
  modified_base 21: mod_base = OTHER; note = 2'-O-methyladenosine-3'- phosphorothioate
  modified_base 22: mod_base = OTHER; note = 2'-O-methylguanosine-3'- phosphorothioate
  modified_base 23: mod_base = OTHER; note = 2'-O-methyluridine-3'-phosphate
  misc_feature 1..4: note = RNA
  misc_feature 5: note = DNA
  misc_feature 6..23: note = RNA
tgaggacaagggaagacccaagt

SEQ ID NO: 1353 - DNA, 23 bp, synthetic construct
  source 1..23: mol_type = other DNA
  modified_base 1: mod_base = OTHER; note = Vinyl-phosphonate 2'-O-methyluridine-3'-phosphorothioate
  modified_base 2: mod_base = OTHER; note = 2'-fluoroguanosine-3'-phosphorothioate
  modified_base 3: mod_base = OTHER; note = 2'-O-methyladenosine-3'-phosphate
  modified_base 4: mod_base = OTHER; note = 2'-O-methylguanosine-3'-phosphate
  modified_base 6: mod_base = OTHER; note = 2'-O-methylguanosine-3'-phosphate
  modified_base 7: mod_base = OTHER; note = guanosine-2'-phosphate
  modified_base 8: mod_base = OTHER; note = 2'-O-methyladenosine-3'-phosphate
  modified_base 9: mod_base = OTHER; note = 2'-O-methylcytidine-3'-phosphate
  modified_base 10: mod_base = OTHER; note = 2'-O-methyladenosine-3'-phosphate
  modified_base 11: mod_base = OTHER; note = 2'-O-methyladenosine-3'-phosphate
  modified_base 12: mod_base = OTHER; note = 2'-O-methylguanosine-3'-phosphate
  modified_base 13: mod_base = OTHER; note = 2'-O-methylguanosine-3'-phosphate
  modified_base 14: mod_base = OTHER; note = 2'-fluoroguanosine-3'-phosphate
  modified_base 15: mod_base = OTHER; note = 2'-O-methyladenosine-3'-phosphate
  modified_base 16: mod_base = OTHER; note = 2'-fluoroadenosine-3'-phosphate
  modified_base 17: mod_base = OTHER; note = 2'-O-methylguanosine-3'-phosphate
  modified_base 18: mod_base = OTHER; note = 2'-O-methyladenosine-3'-phosphate
  modified_base 19: mod_base = OTHER; note = 2'-O-methylcytidine-3'-phosphate
  modified_base 20: mod_base = OTHER; note = 2'-O-methylcytidine-3'-phosphate
  modified_base 21: mod_base = OTHER; note = 2'-O-methylcytidine-3'- phosphorothioate
  modified_base 22: mod_base = OTHER; note = 2'-O-methyladenosine-3'- phosphorothioate
  modified_base 23: mod_base = OTHER; note = 2'-O-methyladenosine-3'-phosphate
  misc_feature 1..4: note = RNA
  misc_feature 5: note = DNA
  misc_feature 6..23: note = RNA
tgagaggacaagggaagacccaa

SEQ ID NO: 1354 - DNA, 23 bp, synthetic construct
  source 1..23: mol_type = other DNA
  modified_base 1: mod_base = OTHER; note = Vinyl-phosphonate 2'-O-methyluridine-3'-phosphorothioate
  modified_base 2: mod_base = OTHER; note = 2'-fluorocytidine-3'-phosphorothioate
  modified_base 3: mod_base = OTHER; note = 2'-O-methylguanosine-3'-phosphate
  modified_base 4: mod_base = OTHER; note = 2'-O-methyladenosine-3'-phosphate
  modified_base 6: mod_base = OTHER; note = 2'-O-methyladenosine-3'-phosphate
  modified_base 7: mod_base = OTHER; note = guanosine-2'-phosphate
  modified_base 8: mod_base = OTHER; note = 2'-O-methylguanosine-3'-phosphate
  modified_base 9: mod_base = OTHER; note = 2'-O-methyladenosine-3'-phosphate
  modified_base 10: mod_base = OTHER; note = 2'-O-methylcytidine-3'-phosphate
  modified_base 11: mod_base = OTHER; note = 2'-O-methyladenosine-3'-phosphate
  modified_base 12: mod_base = OTHER; note = 2'-O-methyladenosine-3'-phosphate
  modified_base 13: mod_base = OTHER; note = 2'-O-methylguanosine-3'-phosphate
  modified_base 14: mod_base = OTHER; note = 2'-fluoroguanosine-3'-phosphate
  modified_base 15: mod_base = OTHER; note = 2'-O-methylguanosine-3'-phosphate
  modified_base 16: mod_base = OTHER; note = 2'-fluoroadenosine-3'-phosphate
  modified_base 17: mod_base = OTHER; note = 2'-O-methyladenosine-3'-phosphate
  modified_base 18: mod_base = OTHER; note = 2'-O-methylguanosine-3'-phosphate
  modified_base 19: mod_base = OTHER; note = 2'-O-methyladenosine-3'-phosphate
  modified_base 20: mod_base = OTHER; note = 2'-O-methylcytidine-3'-phosphate
  modified_base 21: mod_base = OTHER; note = 2'-O-methylcytidine-3'- phosphorothioate
  modified_base 22: mod_base = OTHER; note = 2'-O-methylcytidine-3'- phosphorothioate
  modified_base 23: mod_base = OTHER; note = 2'-O-methyladenosine-3'-phosphate
  misc_feature 1..4: note = RNA
  misc_feature 5: note = DNA
  misc_feature 6..23: note = RNA
tcgagaggacaagggaagaccca

SEQ ID NO: 1355 - DNA, 23 bp, synthetic construct
  source 1..23: mol_type = other DNA
  modified_base 1: mod_base = OTHER; note = Vinyl-phosphonate 2'-O-methyluridine-3'-phosphorothioate
  modified_base 2: mod_base = OTHER; note = 2'-fluorocytidine-3'-phosphorothioate
  modified_base 3: mod_base = OTHER; note = 2'-O-methylcytidine-3'-phosphate
  modified_base 4: mod_base = OTHER; note = 2'-O-methylcytidine-3'-phosphate
  modified_base 6: mod_base = OTHER; note = 2'-O-methylcytidine-3'-phosphate
  modified_base 7: mod_base = OTHER; note = guanosine-2'-phosphate
  modified_base 8: mod_base = OTHER; note = 2'-O-methylcytidine-3'-phosphate
  modified_base 9: mod_base = OTHER; note = 2'-O-methylguanosine-3'-phosphate
  modified_base 10: mod_base = OTHER; note = 2'-O-methyladenosine-3'-phosphate
  modified_base 11: mod_base = OTHER; note = 2'-O-methylguanosine-3'-phosphate
  modified_base 12: mod_base = OTHER; note = 2'-O-methyladenosine-3'-phosphate
  modified_base 13: mod_base = OTHER; note = 2'-O-methylguanosine-3'-phosphate
  modified_base 14: mod_base = OTHER; note = 2'-fluoroguanosine-3'-phosphate
  modified_base 15: mod_base = OTHER; note = 2'-O-methyladenosine-3'-phosphate
  modified_base 16: mod_base = OTHER; note = 2'-fluorocytidine-3'-phosphate
  modified_base 17: mod_base = OTHER; note = 2'-O-methyladenosine-3'-phosphate
  modified_base 18: mod_base = OTHER; note = 2'-O-methyladenosine-3'-phosphate
  modified_base 19: mod_base = OTHER; note = 2'-O-methylguanosine-3'-phosphate
  modified_base 20: mod_base = OTHER; note = 2'-O-methylguanosine-3'-phosphate
  modified_base 21: mod_base = OTHER; note = 2'-O-methylguanosine-3'- phosphorothioate
  modified_base 22: mod_base = OTHER; note = 2'-O-methyladenosine-3'- phosphorothioate
  modified_base 23: mod_base = OTHER; note = 2'-O-methyladenosine-3'-phosphate
  misc_feature 1..4: note = RNA
  misc_feature 5: note = DNA
  misc_feature 6..23: note = RNA
tccctcgcgagaggacaagggaa

SEQ ID NO: 1356 - DNA, 23 bp, synthetic construct
  source 1..23: mol_type = other DNA
  modified_base 1: mod_base = OTHER; note = Vinyl-phosphonate 2'-O-methyluridine-3'-phosphorothioate
  modified_base 2: mod_base = OTHER; note = 2'-fluorouridine -3'-phosphorothioate
  modified_base 3: mod_base = OTHER; note = 2'-O-methylcytidine-3'-phosphate
  modified_base 4: mod_base = OTHER; note = 2'-O-methylguanosine-3'-phosphate
  modified_base 6: mod_base = OTHER; note = 2'-O-methyluridine-3'-phosphate
  modified_base 7: mod_base = OTHER; note = guanosine-2'-phosphate
  modified_base 8: mod_base = OTHER; note = 2'-O-methyladenosine-3'-phosphate
  modified_base 9: mod_base = OTHER; note = 2'-O-methyladenosine-3'-phosphate
  modified_base 10: mod_base = OTHER; note = 2'-O-methyluridine-3'-phosphate
  modified_base 11: mod_base = OTHER; note = 2'-O-methyluridine-3'-phosphate
  modified_base 12: mod_base = OTHER; note = 2'-O-methylcytidine-3'-phosphate
  modified_base 13: mod_base = OTHER; note = 2'-O-methyladenosine-3'-phosphate
  modified_base 14: mod_base = OTHER; note = 2'-fluoroguanosine-3'-phosphate
  modified_base 15: mod_base = OTHER; note = 2'-O-methylguanosine-3'-phosphate
  modified_base 16: mod_base = OTHER; note = 2'-fluoroadenosine-3'-phosphate
  modified_base 17: mod_base = OTHER; note = 2'-O-methylcytidine-3'-phosphate
  modified_base 18: mod_base = OTHER; note = 2'-O-methyladenosine-3'-phosphate
  modified_base 19: mod_base = OTHER; note = 2'-O-methylguanosine-3'-phosphate
  modified_base 20: mod_base = OTHER; note = 2'-O-methylguanosine-3'-phosphate
  modified_base 21: mod_base = OTHER; note = 2'-O-methylcytidine-3'- phosphorothioate
  modified_base 22: mod_base = OTHER; note = 2'-O-methylcytidine-3'- phosphorothioate
  modified_base 23: mod_base = OTHER; note = 2'-O-methylcytidine-3'-phosphate
  misc_feature 1..4: note = RNA
  misc_feature 5: note = DNA
  misc_feature 6..23: note = RNA
ttcggtgaattcaggacaggccc

SEQ ID NO: 1357 - DNA, 23 bp, synthetic construct
  source 1..23: mol_type = other DNA
  modified_base 1: mod_base = OTHER; note = Vinyl-phosphonate 2'-O-methyluridine-3'-phosphorothioate
  modified_base 2: mod_base = OTHER; note = 2'-fluorocytidine-3'-phosphorothioate
  modified_base 3: mod_base = OTHER; note = 2'-O-methylcytidine-3'-phosphate
  modified_base 4: mod_base = OTHER; note = 2'-O-methyluridine-3'-phosphate
  modified_base 6: mod_base = OTHER; note = 2'-O-methylguanosine-3'-phosphate
  modified_base 7: mod_base = OTHER; note = guanosine-2'-phosphate
  modified_base 8: mod_base = OTHER; note = 2'-O-methyluridine-3'-phosphate
  modified_base 9: mod_base = OTHER; note = 2'-O-methylguanosine-3'-phosphate
  modified_base 10: mod_base = OTHER; note = 2'-O-methyladenosine-3'-phosphate
  modified_base 11: mod_base = OTHER; note = 2'-O-methyladenosine-3'-phosphate
  modified_base 12: mod_base = OTHER; note = 2'-O-methyluridine-3'-phosphate
  modified_base 13: mod_base = OTHER; note = 2'-O-methyluridine-3'-phosphate
  modified_base 14: mod_base = OTHER; note = 2'-fluorocytidine-3'-phosphate
  modified_base 15: mod_base = OTHER; note = 2'-O-methyladenosine-3'-phosphate
  modified_base 16: mod_base = OTHER; note = 2'-fluoroguanosine-3'-phosphate
  modified_base 17: mod_base = OTHER; note = 2'-O-methylguanosine-3'-phosphate
  modified_base 18: mod_base = OTHER; note = 2'-O-methyladenosine-3'-phosphate
  modified_base 19: mod_base = OTHER; note = 2'-O-methylcytidine-3'-phosphate
  modified_base 20: mod_base = OTHER; note = 2'-O-methyladenosine-3'-phosphate
  modified_base 21: mod_base = OTHER; note = 2'-O-methylguanosine-3'- phosphorothioate
  modified_base 22: mod_base = OTHER; note = 2'-O-methylguanosine-3'- phosphorothioate
  modified_base 23: mod_base = OTHER; note = 2'-O-methylcytidine-3'-phosphate
  misc_feature 1..4: note = RNA
  misc_feature 5: note = DNA
  misc_feature 6..23: note = RNA
tcctcggtgaattcaggacaggc

SEQ ID NO: 1358 - DNA, 23 bp, synthetic construct
  source 1..23: mol_type = other DNA
  modified_base 1: mod_base = OTHER; note = Vinyl-phosphonate 2'-O-methyluridine-3'-phosphorothioate
  modified_base 2: mod_base = OTHER; note = 2'-fluorocytidine-3'-phosphorothioate
  modified_base 3: mod_base = OTHER; note = 2'-O-methyluridine-3'-phosphate
  modified_base 4: mod_base = OTHER; note = 2'-O-methyluridine-3'-phosphate
  modified_base 6: mod_base = OTHER; note = 2'-O-methylguanosine-3'-phosphate
  modified_base 7: mod_base = OTHER; note = cytidine-2'-phosphate
  modified_base 8: mod_base = OTHER; note = 2'-O-methyladenosine-3'-phosphate
  modified_base 9: mod_base = OTHER; note = 2'-O-methyluridine-3'-phosphate
  modified_base 10: mod_base = OTHER; note = 2'-O-methylcytidine-3'-phosphate
  modified_base 11: mod_base = OTHER; note = 2'-O-methylcytidine-3'-phosphate
  modified_base 12: mod_base = OTHER; note = 2'-O-methyluridine-3'-phosphate
  modified_base 13: mod_base = OTHER; note = 2'-O-methylguanosine-3'-phosphate
  modified_base 14: mod_base = OTHER; note = 2'-fluorocytidine-3'-phosphate
  modified_base 15: mod_base = OTHER; note = 2'-O-methylguanosine-3'-phosphate
  modified_base 16: mod_base = OTHER; note = 2'-fluoroadenosine-3'-phosphate
  modified_base 17: mod_base = OTHER; note = 2'-O-methyladenosine-3'-phosphate
  modified_base 18: mod_base = OTHER; note = 2'-O-methylguanosine-3'-phosphate
  modified_base 19: mod_base = OTHER; note = 2'-O-methylguanosine-3'-phosphate
  modified_base 20: mod_base = OTHER; note = 2'-O-methylguanosine-3'-phosphate
  modified_base 21: mod_base = OTHER; note = 2'-O-methylcytidine-3'- phosphorothioate
  modified_base 22: mod_base = OTHER; note = 2'-O-methylguanosine-3'- phosphorothioate
  modified_base 23: mod_base = OTHER; note = 2'-O-methyladenosine-3'-phosphate
  misc_feature 1..4: note = RNA
  misc_feature 5: note = DNA
  misc_feature 6..23: note = RNA
tcttcgcatcctgcgaagggcga

SEQ ID NO: 1359 - DNA, 23 bp, synthetic construct
  source 1..23: mol_type = other DNA
  modified_base 1: mod_base = OTHER; note = Vinyl-phosphonate 2'-O-methyluridine-3'-phosphorothioate
  modified_base 2: mod_base = OTHER; note = 2'-fluorouridine -3'-phosphorothioate
  modified_base 3: mod_base = OTHER; note = 2'-O-methylcytidine-3'-phosphate
  modified_base 4: mod_base = OTHER; note = 2'-O-methyluridine-3'-phosphate
  modified_base 6: mod_base = OTHER; note = 2'-O-methylcytidine-3'-phosphate
  modified_base 7: mod_base = OTHER; note = guanosine-2'-phosphate
  modified_base 8: mod_base = OTHER; note = 2'-O-methylcytidine-3'-phosphate
  modified_base 9: mod_base = OTHER; note = 2'-O-methyladenosine-3'-phosphate
  modified_base 10: mod_base = OTHER; note = 2'-O-methyluridine-3'-phosphate
  modified_base 11: mod_base = OTHER; note = 2'-O-methylcytidine-3'-phosphate
  modified_base 12: mod_base = OTHER; note = 2'-O-methylcytidine-3'-phosphate
  modified_base 13: mod_base = OTHER; note = 2'-O-methyluridine-3'-phosphate
  modified_base 14: mod_base = OTHER; note = 2'-fluoroguanosine-3'-phosphate
  modified_base 15: mod_base = OTHER; note = 2'-O-methylcytidine-3'-phosphate
  modified_base 16: mod_base = OTHER; note = 2'-fluoroguanosine-3'-phosphate
  modified_base 17: mod_base = OTHER; note = 2'-O-methyladenosine-3'-phosphate
  modified_base 18: mod_base = OTHER; note = 2'-O-methyladenosine-3'-phosphate
  modified_base 19: mod_base = OTHER; note = 2'-O-methylguanosine-3'-phosphate
  modified_base 20: mod_base = OTHER; note = 2'-O-methylguanosine-3'-phosphate
  modified_base 21: mod_base = OTHER; note = 2'-O-methylguanosine-3'- phosphorothioate
  modified_base 22: mod_base = OTHER; note = 2'-O-methylcytidine-3'- phosphorothioate
  modified_base 23: mod_base = OTHER; note = 2'-O-methylguanosine-3'-phosphate
  misc_feature 1..4: note = RNA
  misc_feature 5: note = DNA
  misc_feature 6..23: note = RNA
ttcttcgcatcctgcgaagggcg

SEQ ID NO: 1360 - DNA, 23 bp, synthetic construct
  source 1..23: mol_type = other DNA
  modified_base 1: mod_base = OTHER; note = Vinyl-phosphonate 2'-O-methyluridine-3'-phosphorothioate
  modified_base 2: mod_base = OTHER; note = 2'-fluorocytidine-3'-phosphorothioate
  modified_base 3: mod_base = OTHER; note = 2'-O-methyluridine-3'-phosphate
  modified_base 4: mod_base = OTHER; note = 2'-O-methylcytidine-3'-phosphate
  modified_base 6: mod_base = OTHER; note = 2'-O-methyluridine-3'-phosphate
  modified_base 7: mod_base = OTHER; note = cytidine-2'-phosphate
  modified_base 8: mod_base = OTHER; note = 2'-O-methylguanosine-3'-phosphate
  modified_base 9: mod_base = OTHER; note = 2'-O-methylcytidine-3'-phosphate
  modified_base 10: mod_base = OTHER; note = 2'-O-methyladenosine-3'-phosphate
  modified_base 11: mod_base = OTHER; note = 2'-O-methyluridine-3'-phosphate
  modified_base 12: mod_base = OTHER; note = 2'-O-methylcytidine-3'-phosphate
  modified_base 13: mod_base = OTHER; note = 2'-O-methylcytidine-3'-phosphate
  modified_base 14: mod_base = OTHER; note = 2'-fluorouridine-3'-phosphate
  modified_base 15: mod_base = OTHER; note = 2'-O-methylguanosine-3'-phosphate
  modified_base 16: mod_base = OTHER; note = 2'-fluorocytidine-3'-phosphate
  modified_base 17: mod_base = OTHER; note = 2'-O-methylguanosine-3'-phosphate
  modified_base 18: mod_base = OTHER; note = 2'-O-methyladenosine-3'-phosphate
  modified_base 19: mod_base = OTHER; note = 2'-O-methyladenosine-3'-phosphate
  modified_base 20: mod_base = OTHER; note = 2'-O-methylguanosine-3'-phosphate
  modified_base 21: mod_base = OTHER; note = 2'-O-methylguanosine-3'- phosphorothioate
  modified_base 22: mod_base = OTHER; note = 2'-O-methylguanosine-3'- phosphorothioate
  modified_base 23: mod_base = OTHER; note = 2'-O-methylcytidine-3'-phosphate
  misc_feature 1..4: note = RNA
  misc_feature 5: note = DNA
  misc_feature 6..23: note = RNA
tctcttcgcatcctgcgaagggc

SEQ ID NO: 1361 - DNA, 23 bp, synthetic construct
  source 1..23: mol_type = other DNA
  modified_base 1: mod_base = OTHER; note = Vinyl-phosphonate 2'-O-methyluridine-3'-phosphorothioate
  modified_base 2: mod_base = OTHER; note = 2'-fluorocytidine-3'-phosphorothioate
  modified_base 3: mod_base = OTHER; note = 2'-O-methyladenosine-3'-phosphate
  modified_base 4: mod_base = OTHER; note = 2'-O-methyladenosine-3'-phosphate
  modified_base 6: mod_base = OTHER; note = 2'-O-methyluridine-3'-phosphate
  modified_base 7: mod_base = OTHER; note = cytidine-2'-phosphate
  modified_base 8: mod_base = OTHER; note = 2'-O-methyluridine-3'-phosphate
  modified_base 9: mod_base = OTHER; note = 2'-O-methyluridine-3'-phosphate
  modified_base 10: mod_base = OTHER; note = 2'-O-methylcytidine-3'-phosphate
  modified_base 11: mod_base = OTHER; note = 2'-O-methylguanosine-3'-phosphate
  modified_base 12: mod_base = OTHER; note = 2'-O-methylcytidine-3'-phosphate
  modified_base 13: mod_base = OTHER; note = 2'-O-methyladenosine-3'-phosphate
  modified_base 14: mod_base = OTHER; note = 2'-fluorouridine-3'-phosphate
  modified_base 15: mod_base = OTHER; note = 2'-O-methylcytidine-3'-phosphate
  modified_base 16: mod_base = OTHER; note = 2'-fluorocytidine-3'-phosphate
  modified_base 17: mod_base = OTHER; note = 2'-O-methyluridine-3'-phosphate
  modified_base 18: mod_base = OTHER; note = 2'-O-methylguanosine-3'-phosphate
  modified_base 19: mod_base = OTHER; note = 2'-O-methylcytidine-3'-phosphate
  modified_base 20: mod_base = OTHER; note = 2'-O-methylguanosine-3'-phosphate
  modified_base 21: mod_base = OTHER; note = 2'-O-methyladenosine-3'- phosphorothioate
  modified_base 22: mod_base = OTHER; note = 2'-O-methyladenosine-3'- phosphorothioate
  modified_base 23: mod_base = OTHER; note = 2'-O-methylguanosine-3'-phosphate
  misc_feature 1..4: note = RNA
  misc_feature 5: note = DNA
  misc_feature 6..23: note = RNA
tcaactcttcgcatcctgcgaag

SEQ ID NO: 1362 - DNA, 23 bp, synthetic construct
  source 1..23: mol_type = other DNA
  modified_base 1: mod_base = OTHER; note = Vinyl-phosphonate 2'-O-methyluridine-3'-phosphorothioate
  modified_base 2: mod_base = OTHER; note = 2'-fluoroguanosine-3'-phosphorothioate
  modified_base 3: mod_base = OTHER; note = 2'-O-methylcytidine-3'-phosphate
  modified_base 4: mod_base = OTHER; note = 2'-O-methylcytidine-3'-phosphate
  modified_base 6: mod_base = OTHER; note = 2'-O-methyluridine-3'-phosphate
  modified_base 7: mod_base = OTHER; note = guanosine-2'-phosphate
  modified_base 8: mod_base = OTHER; note = 2'-O-methylguanosine-3'-phosphate
  modified_base 9: mod_base = OTHER; note = 2'-O-methyluridine-3'-phosphate
  modified_base 10: mod_base = OTHER; note = 2'-O-methyluridine-3'-phosphate
  modified_base 11: mod_base = OTHER; note = 2'-O-methyluridine-3'-phosphate
  modified_base 12: mod_base = OTHER; note = 2'-O-methylcytidine-3'-phosphate
  modified_base 13: mod_base = OTHER; note = 2'-O-methyluridine-3'-phosphate
  modified_base 14: mod_base = OTHER; note = 2'-fluorocytidine-3'-phosphate
  modified_base 15: mod_base = OTHER; note = 2'-O-methylguanosine-3'-phosphate
  modified_base 16: mod_base = OTHER; note = 2'-fluorocytidine-3'-phosphate
  modified_base 17: mod_base = OTHER; note = 2'-O-methyladenosine-3'-phosphate
  modified_base 18: mod_base = OTHER; note = 2'-O-methyladenosine-3'-phosphate
  modified_base 19: mod_base = OTHER; note = 2'-O-methyladenosine-3'-phosphate
  modified_base 20: mod_base = OTHER; note = 2'-O-methyluridine-3'-phosphate
  modified_base 21: mod_base = OTHER; note = 2'-O-methyladenosine-3'- phosphorothioate
  modified_base 22: mod_base = OTHER; note = 2'-O-methyladenosine-3'- phosphorothioate
  modified_base 23: mod_base = OTHER; note = 2'-O-methyladenosine-3'-phosphate
  misc_feature 1..4: note = RNA
  misc_feature 5: note = DNA
  misc_feature 6..23: note = RNA
tgccctggtttctcgcaaataaa

SEQ ID NO: 1363 - DNA, 23 bp, synthetic construct
  source 1..23: mol_type = other DNA
  modified_base 1: mod_base = OTHER; note = Vinyl-phosphonate 2'-O-methyluridine-3'-phosphorothioate
  modified_base 2: mod_base = OTHER; note = 2'-fluoroguanosine-3'-phosphorothioate
  modified_base 3: mod_base = OTHER; note = 2'-O-methyluridine-3'-phosphate
  modified_base 4: mod_base = OTHER; note = 2'-O-methyluridine-3'-phosphate
  modified_base 6: mod_base = OTHER; note = 2'-O-methyluridine-3'-phosphate
  modified_base 7: mod_base = OTHER; note = cytidine-2'-phosphate
  modified_base 8: mod_base = OTHER; note = 2'-O-methyluridine-3'-phosphate
  modified_base 9: mod_base = OTHER; note = 2'-O-methyluridine-3'-phosphate
  modified_base 10: mod_base = OTHER; note = 2'-O-methylcytidine-3'-phosphate
  modified_base 11: mod_base = OTHER; note = 2'-O-methyladenosine-3'-phosphate
  modified_base 12: mod_base = OTHER; note = 2'-O-methylcytidine-3'-phosphate
  modified_base 13: mod_base = OTHER; note = 2'-O-methyladenosine-3'-phosphate
  modified_base 14: mod_base = OTHER; note = 2'-fluoroadenosine-3'-phosphate
  modified_base 15: mod_base = OTHER; note = 2'-O-methylcytidine-3'-phosphate
  modified_base 16: mod_base = OTHER; note = 2'-fluoroguanosine-3'-phosphate
  modified_base 17: mod_base = OTHER; note = 2'-O-methylcytidine-3'-phosphate
  modified_base 18: mod_base = OTHER; note = 2'-O-methyladenosine-3'-phosphate
  modified_base 19: mod_base = OTHER; note = 2'-O-methylguanosine-3'-phosphate
  modified_base 20: mod_base = OTHER; note = 2'-O-methyluridine-3'-phosphate
  modified_base 21: mod_base = OTHER; note = 2'-O-methyluridine-3'-phosphorothioate
  modified_base 22: mod_base = OTHER; note = 2'-O-methyladenosine-3'- phosphorothioate
  modified_base 23: mod_base = OTHER; note = 2'-O-methyladenosine-3'-phosphate
  misc_feature 1..4: note = RNA
  misc_feature 5: note = DNA
  misc_feature 6..23: note = RNA
tgttctcttcacaacgcagttaa

SEQ ID NO: 1364 - DNA, 23 bp, synthetic construct
  source 1..23: mol_type = other DNA
  modified_base 1: mod_base = OTHER; note = Vinyl-phosphonate 2'-O-methyluridine-3'-phosphorothioate
  modified_base 2: mod_base = OTHER; note = 2'-fluoroadenosine-3'-phosphorothioate
  modified_base 3: mod_base = OTHER; note = 2'-O-methyladenosine-3'-phosphate
  modified_base 4: mod_base = OTHER; note = 2'-O-methylguanosine-3'-phosphate
  modified_base 6: mod_base = OTHER; note = 2'-O-methyluridine-3'-phosphate
  modified_base 7: mod_base = OTHER; note = cytidine-2'-phosphate
  modified_base 8: mod_base = OTHER; note = 2'-O-methyluridine-3'-phosphate
  modified_base 9: mod_base = OTHER; note = 2'-O-methylcytidine-3'-phosphate
  modified_base 10: mod_base = OTHER; note = 2'-O-methyluridine-3'-phosphate
  modified_base 11: mod_base = OTHER; note = 2'-O-methyluridine-3'-phosphate
  modified_base 12: mod_base = OTHER; note = 2'-O-methylcytidine-3'-phosphate
  modified_base 13: mod_base = OTHER; note = 2'-O-methyladenosine-3'-phosphate
  modified_base 14: mod_base = OTHER; note = 2'-fluorocytidine-3'-phosphate
  modified_base 15: mod_base = OTHER; note = 2'-O-methyladenosine-3'-phosphate
  modified_base 16: mod_base = OTHER; note = 2'-fluoroadenosine-3'-phosphate
  modified_base 17: mod_base = OTHER; note = 2'-O-methylcytidine-3'-phosphate
  modified_base 18: mod_base = OTHER; note = 2'-O-methylguanosine-3'-phosphate
  modified_base 19: mod_base = OTHER; note = 2'-O-methylcytidine-3'-phosphate
  modified_base 20: mod_base = OTHER; note = 2'-O-methyladenosine-3'-phosphate
  modified_base 21: mod_base = OTHER; note = 2'-O-methylguanosine-3'- phosphorothioate
  modified_base 22: mod_base = OTHER; note = 2'-O-methyluridine-3'-phosphorothioate
  modified_base 23: mod_base = OTHER; note = 2'-O-methyluridine-3'-phosphate
  misc_feature 1..4: note = RNA
  misc_feature 5: note = DNA
  misc_feature 6..23: note = RNA
taagttctcttcacaacgcagtt

SEQ ID NO: 1365 - DNA, 23 bp, synthetic construct
  source 1..23: mol_type = other DNA
  modified_base 1: mod_base = OTHER; note = Vinyl-phosphonate 2'-O-methyluridine-3'-phosphorothioate
  modified_base 2: mod_base = OTHER; note = 2'-fluorouridine -3'-phosphorothioate
  modified_base 3: mod_base = OTHER; note = 2'-O-methylcytidine-3'-phosphate
  modified_base 4: mod_base = OTHER; note = 2'-O-methylcytidine-3'-phosphate
  modified_base 6: mod_base = OTHER; note = 2'-O-methyladenosine-3'-phosphate
  modified_base 7: mod_base = OTHER; note = guanosine-2'-phosphate
  modified_base 8: mod_base = OTHER; note = 2'-O-methyluridine-3'-phosphate
  modified_base 9: mod_base = OTHER; note = 2'-O-methyluridine-3'-phosphate
  modified_base 10: mod_base = OTHER; note = 2'-O-methylcytidine-3'-phosphate
  modified_base 11: mod_base = OTHER; note = 2'-O-methyluridine-3'-phosphate
  modified_base 12: mod_base = OTHER; note = 2'-O-methylcytidine-3'-phosphate
  modified_base 13: mod_base = OTHER; note = 2'-O-methyluridine-3'-phosphate
  modified_base 14: mod_base = OTHER; note = 2'-fluorouridine-3'-phosphate
  modified_base 15: mod_base = OTHER; note = 2'-O-methylcytidine-3'-phosphate
  modified_base 16: mod_base = OTHER; note = 2'-fluoroadenosine-3'-phosphate
  modified_base 17: mod_base = OTHER; note = 2'-O-methylcytidine-3'-phosphate
  modified_base 18: mod_base = OTHER; note = 2'-O-methyladenosine-3'-phosphate
  modified_base 19: mod_base = OTHER; note = 2'-O-methyladenosine-3'-phosphate
  modified_base 20: mod_base = OTHER; note = 2'-O-methylcytidine-3'-phosphate
  modified_base 21: mod_base = OTHER; note = 2'-O-methylguanosine-3'- phosphorothioate
  modified_base 22: mod_base = OTHER; note = 2'-O-methylcytidine-3'- phosphorothioate
  modified_base 23: mod_base = OTHER; note = 2'-O-methyladenosine-3'-phosphate
  misc_feature 1..4: note = RNA
  misc_feature 5: note = DNA
  misc_feature 6..23: note = RNA
ttccaagttctcttcacaacgca

SEQ ID NO: 1366 - DNA, 23 bp, synthetic construct
  source 1..23: mol_type = other DNA
  modified_base 1: mod_base = OTHER; note = Vinyl-phosphonate 2'-O-methyluridine-3'-phosphorothioate
  modified_base 2: mod_base = OTHER; note = 2'-fluorocytidine-3'-phosphorothioate
  modified_base 3: mod_base = OTHER; note = 2'-O-methyluridine-3'-phosphate
  modified_base 4: mod_base = OTHER; note = 2'-O-methylcytidine-3'-phosphate
  modified_base 6: mod_base = OTHER; note = 2'-O-methyluridine-3'-phosphate
  modified_base 7: mod_base = OTHER; note = cytidine-2'-phosphate
  modified_base 8: mod_base = OTHER; note = 2'-O-methylcytidine-3'-phosphate
  modified_base 9: mod_base = OTHER; note = 2'-O-methyladenosine-3'-phosphate
  modified_base 10: mod_base = OTHER; note = 2'-O-methyladenosine-3'-phosphate
  modified_base 11: mod_base = OTHER; note = 2'-O-methylguanosine-3'-phosphate
  modified_base 12: mod_base = OTHER; note = 2'-O-methyluridine-3'-phosphate
  modified_base 13: mod_base = OTHER; note = 2'-O-methyluridine-3'-phosphate
  modified_base 14: mod_base = OTHER; note = 2'-fluorocytidine-3'-phosphate
  modified_base 15: mod_base = OTHER; note = 2'-O-methyluridine-3'-phosphate
  modified_base 16: mod_base = OTHER; note = 2'-fluorocytidine-3'-phosphate
  modified_base 17: mod_base = OTHER; note = 2'-O-methyluridine-3'-phosphate
  modified_base 18: mod_base = OTHER; note = 2'-O-methyluridine-3'-phosphate
  modified_base 19: mod_base = OTHER; note = 2'-O-methylcytidine-3'-phosphate
  modified_base 20: mod_base = OTHER; note = 2'-O-methyladenosine-3'-phosphate
  modified_base 21: mod_base = OTHER; note = 2'-O-methylcytidine-3'- phosphorothioate
  modified_base 22: mod_base = OTHER; note = 2'-O-methyladenosine-3'- phosphorothioate
  modified_base 23: mod_base = OTHER; note = 2'-O-methyladenosine-3'-phosphate
  misc_feature 1..4: note = RNA
  misc_feature 5: note = DNA
  misc_feature 6..23: note = RNA
tctcctccaagttctcttcacaa

SEQ ID NO: 1367 - DNA, 23 bp, synthetic construct
  source 1..23: mol_type = other DNA
  modified_base 1: mod_base = OTHER; note = Vinyl-phosphonate 2'-O-methyluridine-3'-phosphorothioate
  modified_base 2: mod_base = OTHER; note = 2'-fluoroguanosine-3'-phosphorothioate
  modified_base 3: mod_base = OTHER; note = 2'-O-methylguanosine-3'-phosphate
  modified_base 4: mod_base = OTHER; note = 2'-O-methylcytidine-3'-phosphate
  modified_base 6: mod_base = OTHER; note = 2'-O-methylcytidine-3'-phosphate
  modified_base 7: mod_base = OTHER; note = cytidine-2'-phosphate
  modified_base 8: mod_base = OTHER; note = 2'-O-methyluridine-3'-phosphate
  modified_base 9: mod_base = OTHER; note = 2'-O-methylcytidine-3'-phosphate
  modified_base 10: mod_base = OTHER; note = 2'-O-methylcytidine-3'-phosphate
  modified_base 11: mod_base = OTHER; note = 2'-O-methyladenosine-3'-phosphate
  modified_base 12: mod_base = OTHER; note = 2'-O-methyladenosine-3'-phosphate
  modified_base 13: mod_base = OTHER; note = 2'-O-methylguanosine-3'-phosphate
  modified_base 14: mod_base = OTHER; note = 2'-fluorouridine-3'-phosphate
  modified_base 15: mod_base = OTHER; note = 2'-O-methyluridine-3'-phosphate
  modified_base 16: mod_base = OTHER; note = 2'-fluorocytidine-3'-phosphate
  modified_base 17: mod_base = OTHER; note = 2'-O-methyluridine-3'-phosphate
  modified_base 18: mod_base = OTHER; note = 2'-O-methylcytidine-3'-phosphate
  modified_base 19: mod_base = OTHER; note = 2'-O-methyluridine-3'-phosphate
  modified_base 20: mod_base = OTHER; note = 2'-O-methyluridine-3'-phosphate
  modified_base 21: mod_base = OTHER; note = 2'-O-methylcytidine-3'- phosphorothioate
  modified_base 22: mod_base = OTHER; note = 2'-O-methyladenosine-3'- phosphorothioate
  modified_base 23: mod_base = OTHER; note = 2'-O-methylcytidine-3'-phosphate
  misc_feature 1..4: note = RNA
  misc_feature 5: note = DNA
  misc_feature 6..23: note = RNA
tggctcctccaagttctcttcac

SEQ ID NO: 1368 - DNA, 23 bp, synthetic construct
  source 1..23: mol_type = other DNA
  modified_base 1: mod_base = OTHER; note = Vinyl-phosphonate 2'-O-methyluridine-3'-phosphorothioate
  modified_base 2: mod_base = OTHER; note = 2'-fluorocytidine-3'-phosphorothioate
  modified_base 3: mod_base = OTHER; note = 2'-O-methylguanosine-3'-phosphate
  modified_base 4: mod_base = OTHER; note = 2'-O-methylguanosine-3'-phosphate
  modified_base 6: mod_base = OTHER; note = 2'-O-methyluridine-3'-phosphate
  modified_base 7: mod_base = OTHER; note = cytidine-2'-phosphate
  modified_base 8: mod_base = OTHER; note = 2'-O-methylcytidine-3'-phosphate
  modified_base 9: mod_base = OTHER; note = 2'-O-methyluridine-3'-phosphate
  modified_base 10: mod_base = OTHER; note = 2'-O-methylcytidine-3'-phosphate
  modified_base 11: mod_base = OTHER; note = 2'-O-methylcytidine-3'-phosphate
  modified_base 12: mod_base = OTHER; note = 2'-O-methyladenosine-3'-phosphate
  modified_base 13: mod_base = OTHER; note = 2'-O-methyladenosine-3'-phosphate
  modified_base 14: mod_base = OTHER; note = 2'-fluoroguanosine-3'-phosphate
  modified_base 15: mod_base = OTHER; note = 2'-O-methyluridine-3'-phosphate
  modified_base 16: mod_base = OTHER; note = 2'-fluorouridine-3'-phosphate
  modified_base 17: mod_base = OTHER; note = 2'-O-methylcytidine-3'-phosphate
  modified_base 18: mod_base = OTHER; note = 2'-O-methyluridine-3'-phosphate
  modified_base 19: mod_base = OTHER; note = 2'-O-methylcytidine-3'-phosphate
  modified_base 20: mod_base = OTHER; note = 2'-O-methyluridine-3'-phosphate
  modified_base 21: mod_base = OTHER; note = 2'-O-methyluridine-3'-phosphorothioate
  modified_base 22: mod_base = OTHER; note = 2'-O-methylcytidine-3'- phosphorothioate
  modified_base 23: mod_base = OTHER; note = 2'-O-methyladenosine-3'-phosphate
  misc_feature 1..4: note = RNA
  misc_feature 5: note = DNA
  misc_feature 6..23: note = RNA
tcggctcctccaagttctcttca

SEQ ID NO: 1369 - DNA, 23 bp, synthetic construct
  source 1..23: mol_type = other DNA
  modified_base 1: mod_base = OTHER; note = Vinyl-phosphonate 2'-O-methyluridine-3'-phosphorothioate
  modified_base 2: mod_base = OTHER; note = 2'-fluorocytidine-3'-phosphorothioate
  modified_base 3: mod_base = OTHER; note = 2'-O-methyluridine-3'-phosphate
  modified_base 4: mod_base = OTHER; note = 2'-O-methylcytidine-3'-phosphate
  modified_base 6: mod_base = OTHER; note = 2'-O-methylguanosine-3'-phosphate
  modified_base 7: mod_base = OTHER; note = cytidine-2'-phosphate
  modified_base 8: mod_base = OTHER; note = 2'-O-methyluridine-3'-phosphate
  modified_base 9: mod_base = OTHER; note = 2'-O-methylcytidine-3'-phosphate
  modified_base 10: mod_base = OTHER; note = 2'-O-methylcytidine-3'-phosphate
  modified_base 11: mod_base = OTHER; note = 2'-O-methyluridine-3'-phosphate
  modified_base 12: mod_base = OTHER; note = 2'-O-methylcytidine-3'-phosphate
  modified_base 13: mod_base = OTHER; note = 2'-O-methylcytidine-3'-phosphate
  modified_base 14: mod_base = OTHER; note = 2'-fluoroadenosine-3'-phosphate
  modified_base 15: mod_base = OTHER; note = 2'-O-methyladenosine-3'-phosphate
  modified_base 16: mod_base = OTHER; note = 2'-fluoroguanosine-3'-phosphate
  modified_base 17: mod_base = OTHER; note = 2'-O-methyluridine-3'-phosphate
  modified_base 18: mod_base = OTHER; note = 2'-O-methyluridine-3'-phosphate
  modified_base 19: mod_base = OTHER; note = 2'-O-methylcytidine-3'-phosphate
  modified_base 20: mod_base = OTHER; note = 2'-O-methyluridine-3'-phosphate
  modified_base 21: mod_base = OTHER; note = 2'-O-methylcytidine-3'- phosphorothioate
  modified_base 22: mod_base = OTHER; note = 2'-O-methyluridine-3'-phosphorothioate
  modified_base 23: mod_base = OTHER; note = 2'-O-methyluridine-3'-phosphate
  misc_feature 1..4: note = RNA
  misc_feature 5: note = DNA
  misc_feature 6..23: note = RNA
tctcggctcctccaagttctctt

SEQ ID NO: 1370 - DNA, 23 bp, synthetic construct
  source 1..23: mol_type = other DNA
  modified_base 1: mod_base = OTHER; note = Vinyl-phosphonate 2'-O-methyluridine-3'-phosphorothioate
  modified_base 2: mod_base = OTHER; note = 2'-fluorouridine -3'-phosphorothioate
  modified_base 3: mod_base = OTHER; note = 2'-O-methylcytidine-3'-phosphate
  modified_base 4: mod_base = OTHER; note = 2'-O-methyluridine-3'-phosphate
  modified_base 6: mod_base = OTHER; note = 2'-O-methylguanosine-3'-phosphate
  modified_base 7: mod_base = OTHER; note = guanosine-2'-phosphate
  modified_base 8: mod_base = OTHER; note = 2'-O-methylcytidine-3'-phosphate
  modified_base 9: mod_base = OTHER; note = 2'-O-methyluridine-3'-phosphate
  modified_base 10: mod_base = OTHER; note = 2'-O-methylcytidine-3'-phosphate
  modified_base 11: mod_base = OTHER; note = 2'-O-methylcytidine-3'-phosphate
  modified_base 12: mod_base = OTHER; note = 2'-O-methyluridine-3'-phosphate
  modified_base 13: mod_base = OTHER; note = 2'-O-methylcytidine-3'-phosphate
  modified_base 14: mod_base = OTHER; note = 2'-fluorocytidine-3'-phosphate
  modified_base 15: mod_base = OTHER; note = 2'-O-methyladenosine-3'-phosphate
  modified_base 16: mod_base = OTHER; note = 2'-fluoroadenosine-3'-phosphate
  modified_base 17: mod_base = OTHER; note = 2'-O-methylguanosine-3'-phosphate
  modified_base 18: mod_base = OTHER; note = 2'-O-methyluridine-3'-phosphate
  modified_base 19: mod_base = OTHER; note = 2'-O-methyluridine-3'-phosphate
  modified_base 20: mod_base = OTHER; note = 2'-O-methylcytidine-3'-phosphate
  modified_base 21: mod_base = OTHER; note = 2'-O-methyluridine-3'-phosphorothioate
  modified_base 22: mod_base = OTHER; note = 2'-O-methylcytidine-3'- phosphorothioate
  modified_base 23: mod_base = OTHER; note = 2'-O-methyluridine-3'-phosphate
  misc_feature 1..4: note = RNA
  misc_feature 5: note = DNA
  misc_feature 6..23: note = RNA
ttctcggctcctccaagttctct

SEQ ID NO: 1371 - DNA, 23 bp, synthetic construct
  source 1..23: mol_type = other DNA
  modified_base 1: mod_base = OTHER; note = Vinyl-phosphonate 2'-O-methyluridine-3'-phosphorothioate
  modified_base 2: mod_base = OTHER; note = 2'-fluoroadenosine-3'-phosphorothioate
  modified_base 3: mod_base = OTHER; note = 2'-O-methyluridine-3'-phosphate
  modified_base 4: mod_base = OTHER; note = 2'-O-methylcytidine-3'-phosphate
  modified_base 6: mod_base = OTHER; note = 2'-O-methylcytidine-3'-phosphate
  modified_base 7: mod_base = OTHER; note = guanosine-2'-phosphate
  modified_base 8: mod_base = OTHER; note = 2'-O-methylguanosine-3'-phosphate
  modified_base 9: mod_base = OTHER; note = 2'-O-methylcytidine-3'-phosphate
  modified_base 10: mod_base = OTHER; note = 2'-O-methyluridine-3'-phosphate
  modified_base 11: mod_base = OTHER; note = 2'-O-methylcytidine-3'-phosphate
  modified_base 12: mod_base = OTHER; note = 2'-O-methylcytidine-3'-phosphate
  modified_base 13: mod_base = OTHER; note = 2'-O-methyluridine-3'-phosphate
  modified_base 14: mod_base = OTHER; note = 2'-fluorocytidine-3'-phosphate
  modified_base 15: mod_base = OTHER; note = 2'-O-methylcytidine-3'-phosphate
  modified_base 16: mod_base = OTHER; note = 2'-fluoroadenosine-3'-phosphate
  modified_base 17: mod_base = OTHER; note = 2'-O-methyladenosine-3'-phosphate
  modified_base 18: mod_base = OTHER; note = 2'-O-methylguanosine-3'-phosphate
  modified_base 19: mod_base = OTHER; note = 2'-O-methyluridine-3'-phosphate
  modified_base 20: mod_base = OTHER; note = 2'-O-methyluridine-3'-phosphate
  modified_base 21: mod_base = OTHER; note = 2'-O-methylcytidine-3'- phosphorothioate
  modified_base 22: mod_base = OTHER; note = 2'-O-methyluridine-3'-phosphorothioate
  modified_base 23: mod_base = OTHER; note = 2'-O-methylcytidine-3'-phosphate
  misc_feature 1..4: note = RNA
  misc_feature 5: note = DNA
  misc_feature 6..23: note = RNA
tatctcggctcctccaagttctc

SEQ ID NO: 1372 - DNA, 23 bp, synthetic construct
  source 1..23: mol_type = other DNA
  modified_base 1: mod_base = OTHER; note = Vinyl-phosphonate 2'-O-methyluridine-3'-phosphorothioate
  modified_base 2: mod_base = OTHER; note = 2'-fluoroadenosine-3'-phosphorothioate
  modified_base 3: mod_base = OTHER; note = 2'-O-methyladenosine-3'-phosphate
  modified_base 4: mod_base = OTHER; note = 2'-O-methyluridine-3'-phosphate
  modified_base 6: mod_base = OTHER; note = 2'-O-methyluridine-3'-phosphate
  modified_base 7: mod_base = OTHER; note = cytidine-2'-phosphate
  modified_base 8: mod_base = OTHER; note = 2'-O-methylguanosine-3'-phosphate
  modified_base 9: mod_base = OTHER; note = 2'-O-methylguanosine-3'-phosphate
  modified_base 10: mod_base = OTHER; note = 2'-O-methylcytidine-3'-phosphate
  modified_base 11: mod_base = OTHER; note = 2'-O-methyluridine-3'-phosphate
  modified_base 12: mod_base = OTHER; note = 2'-O-methylcytidine-3'-phosphate
  modified_base 13: mod_base = OTHER; note = 2'-O-methylcytidine-3'-phosphate
  modified_base 14: mod_base = OTHER; note = 2'-fluorouridine-3'-phosphate
  modified_base 15: mod_base = OTHER; note = 2'-O-methylcytidine-3'-phosphate
  modified_base 16: mod_base = OTHER; note = 2'-fluorocytidine-3'-phosphate
  modified_base 17: mod_base = OTHER; note = 2'-O-methyladenosine-3'-phosphate
  modified_base 18: mod_base = OTHER; note = 2'-O-methyladenosine-3'-phosphate
  modified_base 19: mod_base = OTHER; note = 2'-O-methylguanosine-3'-phosphate
  modified_base 20: mod_base = OTHER; note = 2'-O-methyluridine-3'-phosphate
  modified_base 21: mod_base = OTHER; note = 2'-O-methyluridine-3'-phosphorothioate
  modified_base 22: mod_base = OTHER; note = 2'-O-methylcytidine-3'- phosphorothioate
  modified_base 23: mod_base = OTHER; note = 2'-O-methyluridine-3'-phosphate
  misc_feature 1..4: note = RNA
  misc_feature 5: note = DNA
  misc_feature 6..23: note = RNA
taatctcggctcctccaagttct

SEQ ID NO: 1373 - DNA, 23 bp, synthetic construct
  source 1..23: mol_type = other DNA
  modified_base 1: mod_base = OTHER; note = Vinyl-phosphonate 2'-O-methyluridine-3'-phosphorothioate
  modified_base 2: mod_base = OTHER; note = 2'-fluorocytidine-3'-phosphorothioate
  modified_base 3: mod_base = OTHER; note = 2'-O-methyluridine-3'-phosphate
  modified_base 4: mod_base = OTHER; note = 2'-O-methylguanosine-3'-phosphate
  modified_base 6: mod_base = OTHER; note = 2'-O-methylguanosine-3'-phosphate
  modified_base 7: mod_base = OTHER; note = cytidine-2'-phosphate
  modified_base 8: mod_base = OTHER; note = 2'-O-methyladenosine-3'-phosphate
  modified_base 9: mod_base = OTHER; note = 2'-O-methyladenosine-3'-phosphate
  modified_base 10: mod_base = OTHER; note = 2'-O-methyladenosine-3'-phosphate
  modified_base 11: mod_base = OTHER; note = 2'-O-methyluridine-3'-phosphate
  modified_base 12: mod_base = OTHER; note = 2'-O-methylcytidine-3'-phosphate
  modified_base 13: mod_base = OTHER; note = 2'-O-methyluridine-3'-phosphate
  modified_base 14: mod_base = OTHER; note = 2'-fluorocytidine-3'-phosphate
  modified_base 15: mod_base = OTHER; note = 2'-O-methylguanosine-3'-phosphate
  modified_base 16: mod_base = OTHER; note = 2'-fluoroguanosine-3'-phosphate
  modified_base 17: mod_base = OTHER; note = 2'-O-methylcytidine-3'-phosphate
  modified_base 18: mod_base = OTHER; note = 2'-O-methyluridine-3'-phosphate
  modified_base 19: mod_base = OTHER; note = 2'-O-methylcytidine-3'-phosphate
  modified_base 20: mod_base = OTHER; note = 2'-O-methylcytidine-3'-phosphate
  modified_base 21: mod_base = OTHER; note = 2'-O-methyluridine-3'-phosphorothioate
  modified_base 22: mod_base = OTHER; note = 2'-O-methylcytidine-3'- phosphorothioate
  modified_base 23: mod_base = OTHER; note = 2'-O-methylcytidine-3'-phosphate
  misc_feature 1..4: note = RNA
  misc_feature 5: note = DNA
  misc_feature 6..23: note = RNA
tctgagcaaatctcggctcctcc

SEQ ID NO: 1374 - DNA, 23 bp, synthetic construct
  source 1..23: mol_type = other DNA
  modified_base 1: mod_base = OTHER; note = Vinyl-phosphonate 2'-O-methyluridine-3'-phosphorothioate
  modified_base 2: mod_base = OTHER; note = 2'-fluoroadenosine-3'-phosphorothioate
  modified_base 3: mod_base = OTHER; note = 2'-O-methylcytidine-3'-phosphate
  modified_base 4: mod_base = OTHER; note = 2'-O-methyluridine-3'-phosphate
  modified_base 6: mod_base = OTHER; note = 2'-O-methyladenosine-3'-phosphate
  modified_base 7: mod_base = OTHER; note = guanosine-2'-phosphate
  modified_base 8: mod_base = OTHER; note = 2'-O-methylcytidine-3'-phosphate
  modified_base 9: mod_base = OTHER; note = 2'-O-methyladenosine-3'-phosphate
  modified_base 10: mod_base = OTHER; note = 2'-O-methyladenosine-3'-phosphate
  modified_base 11: mod_base = OTHER; note = 2'-O-methyladenosine-3'-phosphate
  modified_base 12: mod_base = OTHER; note = 2'-O-methyluridine-3'-phosphate
  modified_base 13: mod_base = OTHER; note = 2'-O-methylcytidine-3'-phosphate
  modified_base 14: mod_base = OTHER; note = 2'-fluorouridine-3'-phosphate
  modified_base 15: mod_base = OTHER; note = 2'-O-methylcytidine-3'-phosphate
  modified_base 16: mod_base = OTHER; note = 2'-fluoroguanosine-3'-phosphate
  modified_base 17: mod_base = OTHER; note = 2'-O-methylguanosine-3'-phosphate
  modified_base 18: mod_base = OTHER; note = 2'-O-methylcytidine-3'-phosphate
  modified_base 19: mod_base = OTHER; note = 2'-O-methyluridine-3'-phosphate
  modified_base 20: mod_base = OTHER; note = 2'-O-methylcytidine-3'-phosphate
  modified_base 21: mod_base = OTHER; note = 2'-O-methylcytidine-3'- phosphorothioate
  modified_base 22: mod_base = OTHER; note = 2'-O-methyluridine-3'-phosphorothioate
  modified_base 23: mod_base = OTHER; note = 2'-O-methylcytidine-3'-phosphate
  misc_feature 1..4: note = RNA
  misc_feature 5: note = DNA
  misc_feature 6..23: note = RNA
tactgagcaaatctcggctcctc

SEQ ID NO: 1375 - DNA, 23 bp, synthetic construct
  source 1..23: mol_type = other DNA
  modified_base 1: mod_base = OTHER; note = Vinyl-phosphonate 2'-O-methyluridine-3'-phosphorothioate
  modified_base 2: mod_base = OTHER; note = 2'-fluoroguanosine-3'-phosphorothioate
  modified_base 3: mod_base = OTHER; note = 2'-O-methylcytidine-3'-phosphate
  modified_base 4: mod_base = OTHER; note = 2'-O-methyladenosine-3'-phosphate
  modified_base 6: mod_base = OTHER; note = 2'-O-methyluridine-3'-phosphate
  modified_base 7: mod_base = OTHER; note = guanosine-2'-phosphate
  modified_base 8: mod_base = OTHER; note = 2'-O-methyladenosine-3'-phosphate
  modified_base 9: mod_base = OTHER; note = 2'-O-methylguanosine-3'-phosphate
  modified_base 10: mod_base = OTHER; note = 2'-O-methylcytidine-3'-phosphate
  modified_base 11: mod_base = OTHER; note = 2'-O-methyladenosine-3'-phosphate
  modified_base 12: mod_base = OTHER; note = 2'-O-methyladenosine-3'-phosphate
  modified_base 13: mod_base = OTHER; note = 2'-O-methyladenosine-3'-phosphate
  modified_base 14: mod_base = OTHER; note = 2'-fluorouridine-3'-phosphate
  modified_base 15: mod_base = OTHER; note = 2'-O-methylcytidine-3'-phosphate
  modified_base 16: mod_base = OTHER; note = 2'-fluorouridine-3'-phosphate
  modified_base 17: mod_base = OTHER; note = 2'-O-methylcytidine-3'-phosphate
  modified_base 18: mod_base = OTHER; note = 2'-O-methylguanosine-3'-phosphate
  modified_base 19: mod_base = OTHER; note = 2'-O-methylguanosine-3'-phosphate
  modified_base 20: mod_base = OTHER; note = 2'-O-methylcytidine-3'-phosphate
  modified_base 21: mod_base = OTHER; note = 2'-O-methyluridine-3'-phosphorothioate
  modified_base 22: mod_base = OTHER; note = 2'-O-methylcytidine-3'- phosphorothioate
  modified_base 23: mod_base = OTHER; note = 2'-O-methylcytidine-3'-phosphate
  misc_feature 1..4: note = RNA
  misc_feature 5: note = DNA
  misc_feature 6..23: note = RNA
tgcactgagcaaatctcggctcc

SEQ ID NO: 1376 - DNA, 23 bp, synthetic construct
  source 1..23: mol_type = other DNA
  modified_base 1: mod_base = OTHER; note = Vinyl-phosphonate 2'-O-methyluridine-3'-phosphorothioate
  modified_base 2: mod_base = OTHER; note = 2'-fluorouridine -3'-phosphorothioate
  modified_base 3: mod_base = OTHER; note = 2'-O-methylguanosine-3'-phosphate
  modified_base 4: mod_base = OTHER; note = 2'-O-methylguanosine-3'-phosphate
  modified_base 6: mod_base = OTHER; note = 2'-O-methyladenosine-3'-phosphate
  modified_base 7: mod_base = OTHER; note = cytidine-2'-phosphate
  modified_base 8: mod_base = OTHER; note = 2'-O-methyluridine-3'-phosphate
  modified_base 9: mod_base = OTHER; note = 2'-O-methylguanosine-3'-phosphate
  modified_base 10: mod_base = OTHER; note = 2'-O-methyladenosine-3'-phosphate
  modified_base 11: mod_base = OTHER; note = 2'-O-methylguanosine-3'-phosphate
  modified_base 12: mod_base = OTHER; note = 2'-O-methylcytidine-3'-phosphate
  modified_base 13: mod_base = OTHER; note = 2'-O-methyladenosine-3'-phosphate
  modified_base 14: mod_base = OTHER; note = 2'-fluoroadenosine-3'-phosphate
  modified_base 15: mod_base = OTHER; note = 2'-O-methyladenosine-3'-phosphate
  modified_base 16: mod_base = OTHER; note = 2'-fluorouridine-3'-phosphate
  modified_base 17: mod_base = OTHER; note = 2'-O-methylcytidine-3'-phosphate
  modified_base 18: mod_base = OTHER; note = 2'-O-methyluridine-3'-phosphate
  modified_base 19: mod_base = OTHER; note = 2'-O-methylcytidine-3'-phosphate
  modified_base 20: mod_base = OTHER; note = 2'-O-methylguanosine-3'-phosphate
  modified_base 21: mod_base = OTHER; note = 2'-O-methylguanosine-3'- phosphorothioate
  modified_base 22: mod_base = OTHER; note = 2'-O-methylcytidine-3'- phosphorothioate
  modified_base 23: mod_base = OTHER; note = 2'-O-methyluridine-3'-phosphate
  misc_feature 1..4: note = RNA
  misc_feature 5: note = DNA
  misc_feature 6..23: note = RNA
ttggcactgagcaaatctcggct

SEQ ID NO: 1377 - DNA, 23 bp, synthetic construct
  source 1..23: mol_type = other DNA
  modified_base 1: mod_base = OTHER; note = Vinyl-phosphonate 2'-O-methyluridine-3'-phosphorothioate
  modified_base 2: mod_base = OTHER; note = 2'-fluoroadenosine-3'-phosphorothioate
  modified_base 3: mod_base = OTHER; note = 2'-O-methylguanosine-3'-phosphate
  modified_base 4: mod_base = OTHER; note = 2'-O-methyluridine-3'-phosphate
  modified_base 6: mod_base = OTHER; note = 2'-O-methylguanosine-3'-phosphate
  modified_base 7: mod_base = OTHER; note = cytidine-2'-phosphate
  modified_base 8: mod_base = OTHER; note = 2'-O-methyladenosine-3'-phosphate
  modified_base 9: mod_base = OTHER; note = 2'-O-methylcytidine-3'-phosphate
  modified_base 10: mod_base = OTHER; note = 2'-O-methyluridine-3'-phosphate
  modified_base 11: mod_base = OTHER; note = 2'-O-methylguanosine-3'-phosphate
  modified_base 12: mod_base = OTHER; note = 2'-O-methyladenosine-3'-phosphate
  modified_base 13: mod_base = OTHER; note = 2'-O-methylguanosine-3'-phosphate
  modified_base 14: mod_base = OTHER; note = 2'-fluorocytidine-3'-phosphate
  modified_base 15: mod_base = OTHER; note = 2'-O-methyladenosine-3'-phosphate
  modified_base 16: mod_base = OTHER; note = 2'-fluoroadenosine-3'-phosphate
  modified_base 17: mod_base = OTHER; note = 2'-O-methyladenosine-3'-phosphate
  modified_base 18: mod_base = OTHER; note = 2'-O-methyluridine-3'-phosphate
  modified_base 19: mod_base = OTHER; note = 2'-O-methylcytidine-3'-phosphate
  modified_base 20: mod_base = OTHER; note = 2'-O-methyluridine-3'-phosphate
  modified_base 21: mod_base = OTHER; note = 2'-O-methylcytidine-3'- phosphorothioate
  modified_base 22: mod_base = OTHER; note = 2'-O-methylguanosine-3'- phosphorothioate
  modified_base 23: mod_base = OTHER; note = 2'-O-methylguanosine-3'-phosphate
  misc_feature 1..4: note = RNA
  misc_feature 5: note = DNA
  misc_feature 6..23: note = RNA
tagtggcactgagcaaatctcgg

SEQ ID NO: 1378 - DNA, 23 bp, synthetic construct
  source 1..23: mol_type = other DNA
  modified_base 1: mod_base = OTHER; note = Vinyl-phosphonate 2'-O-methyluridine-3'-phosphorothioate
  modified_base 2: mod_base = OTHER; note = 2'-fluoroadenosine-3'-phosphorothioate
  modified_base 3: mod_base = OTHER; note = 2'-O-methyladenosine-3'-phosphate
  modified_base 4: mod_base = OTHER; note = 2'-O-methylguanosine-3'-phosphate
  modified_base 6: mod_base = OTHER; note = 2'-O-methylguanosine-3'-phosphate
  modified_base 7: mod_base = OTHER; note = guanosine-2'-phosphate
  modified_base 8: mod_base = OTHER; note = 2'-O-methylcytidine-3'-phosphate
  modified_base 9: mod_base = OTHER; note = 2'-O-methyladenosine-3'-phosphate
  modified_base 10: mod_base = OTHER; note = 2'-O-methylcytidine-3'-phosphate
  modified_base 11: mod_base = OTHER; note = 2'-O-methyluridine-3'-phosphate
  modified_base 12: mod_base = OTHER; note = 2'-O-methylguanosine-3'-phosphate
  modified_base 13: mod_base = OTHER; note = 2'-O-methyladenosine-3'-phosphate
  modified_base 14: mod_base = OTHER; note = 2'-fluoroguanosine-3'-phosphate
  modified_base 15: mod_base = OTHER; note = 2'-O-methylcytidine-3'-phosphate
  modified_base 16: mod_base = OTHER; note = 2'-fluoroadenosine-3'-phosphate
  modified_base 17: mod_base = OTHER; note = 2'-O-methyladenosine-3'-phosphate
  modified_base 18: mod_base = OTHER; note = 2'-O-methyladenosine-3'-phosphate
  modified_base 19: mod_base = OTHER; note = 2'-O-methyluridine-3'-phosphate
  modified_base 20: mod_base = OTHER; note = 2'-O-methylcytidine-3'-phosphate
  modified_base 21: mod_base = OTHER; note = 2'-O-methyluridine-3'-phosphorothioate
  modified_base 22: mod_base = OTHER; note = 2'-O-methylcytidine-3'- phosphorothioate
  modified_base 23: mod_base = OTHER; note = 2'-O-methylguanosine-3'-phosphate
  misc_feature 1..4: note = RNA
  misc_feature 5: note = DNA
  misc_feature 6..23: note = RNA
taagtggcactgagcaaatctcg

SEQ ID NO: 1379 - DNA, 23 bp, synthetic construct
  source 1..23: mol_type = other DNA
  modified_base 1: mod_base = OTHER; note = Vinyl-phosphonate 2'-O-methyluridine-3'-phosphorothioate
  modified_base 2: mod_base = OTHER; note = 2'-fluoroguanosine-3'-phosphorothioate
  modified_base 3: mod_base = OTHER; note = 2'-O-methyladenosine-3'-phosphate
  modified_base 4: mod_base = OTHER; note = 2'-O-methyladenosine-3'-phosphate
  modified_base 6: mod_base = OTHER; note = 2'-O-methyluridine-3'-phosphate
  modified_base 7: mod_base = OTHER; note = guanosine-2'-phosphate
  modified_base 8: mod_base = OTHER; note = 2'-O-methylguanosine-3'-phosphate
  modified_base 9: mod_base = OTHER; note = 2'-O-methylcytidine-3'-phosphate
  modified_base 10: mod_base = OTHER; note = 2'-O-methyladenosine-3'-phosphate
  modified_base 11: mod_base = OTHER; note = 2'-O-methylcytidine-3'-phosphate
  modified_base 12: mod_base = OTHER; note = 2'-O-methyluridine-3'-phosphate
  modified_base 13: mod_base = OTHER; note = 2'-O-methylguanosine-3'-phosphate
  modified_base 14: mod_base = OTHER; note = 2'-fluoroadenosine-3'-phosphate
  modified_base 15: mod_base = OTHER; note = 2'-O-methylguanosine-3'-phosphate
  modified_base 16: mod_base = OTHER; note = 2'-fluorocytidine-3'-phosphate
  modified_base 17: mod_base = OTHER; note = 2'-O-methyladenosine-3'-phosphate
  modified_base 18: mod_base = OTHER; note = 2'-O-methyladenosine-3'-phosphate
  modified_base 19: mod_base = OTHER; note = 2'-O-methyladenosine-3'-phosphate
  modified_base 20: mod_base = OTHER; note = 2'-O-methyluridine-3'-phosphate
  modified_base 21: mod_base = OTHER; note = 2'-O-methylcytidine-3'- phosphorothioate
  modified_base 22: mod_base = OTHER; note = 2'-O-methyluridine-3'-phosphorothioate
  modified_base 23: mod_base = OTHER; note = 2'-O-methylcytidine-3'-phosphate
  misc_feature 1..4: note = RNA
  misc_feature 5: note = DNA
  misc_feature 6..23: note = RNA
tgaagtggcactgagcaaatctc

SEQ ID NO: 1380 - DNA, 23 bp, synthetic construct
  source 1..23: mol_type = other DNA
  modified_base 1: mod_base = OTHER; note = Vinyl-phosphonate 2'-O-methyluridine-3'-phosphorothioate
  modified_base 2: mod_base = OTHER; note = 2'-fluoroguanosine-3'-phosphorothioate
  modified_base 3: mod_base = OTHER; note = 2'-O-methylguanosine-3'-phosphate
  modified_base 4: mod_base = OTHER; note = 2'-O-methylguanosine-3'-phosphate
  modified_base 6: mod_base = OTHER; note = 2'-O-methyladenosine-3'-phosphate
  modified_base 7: mod_base = OTHER; note = guanosine-2'-phosphate
  modified_base 8: mod_base = OTHER; note = 2'-O-methyluridine-3'-phosphate
  modified_base 9: mod_base = OTHER; note = 2'-O-methylguanosine-3'-phosphate
  modified_base 10: mod_base = OTHER; note = 2'-O-methylguanosine-3'-phosphate
  modified_base 11: mod_base = OTHER; note = 2'-O-methylcytidine-3'-phosphate
  modified_base 12: mod_base = OTHER; note = 2'-O-methyladenosine-3'-phosphate
  modified_base 13: mod_base = OTHER; note = 2'-O-methylcytidine-3'-phosphate
  modified_base 14: mod_base = OTHER; note = 2'-fluorouridine-3'-phosphate
  modified_base 15: mod_base = OTHER; note = 2'-O-methylguanosine-3'-phosphate
  modified_base 16: mod_base = OTHER; note = 2'-fluoroadenosine-3'-phosphate
  modified_base 17: mod_base = OTHER; note = 2'-O-methylguanosine-3'-phosphate
  modified_base 18: mod_base = OTHER; note = 2'-O-methylcytidine-3'-phosphate
  modified_base 19: mod_base = OTHER; note = 2'-O-methyladenosine-3'-phosphate
  modified_base 20: mod_base = OTHER; note = 2'-O-methyladenosine-3'-phosphate
  modified_base 21: mod_base = OTHER; note = 2'-O-methyladenosine-3'- phosphorothioate
  modified_base 22: mod_base = OTHER; note = 2'-O-methyluridine-3'-phosphorothioate
  modified_base 23: mod_base = OTHER; note = 2'-O-methylcytidine-3'-phosphate
  misc_feature 1..4: note = RNA
  misc_feature 5: note = DNA
  misc_feature 6..23: note = RNA
tgggaagtggcactgagcaaatc

SEQ ID NO: 1381 - DNA, 23 bp, synthetic construct
  source 1..23: mol_type = other DNA
  modified_base 1: mod_base = OTHER; note = Vinyl-phosphonate 2'-O-methyluridine-3'-phosphorothioate
  modified_base 2: mod_base = OTHER; note = 2'-fluoroadenosine-3'-phosphorothioate
  modified_base 3: mod_base = OTHER; note = 2'-O-methylguanosine-3'-phosphate
  modified_base 4: mod_base = OTHER; note = 2'-O-methyladenosine-3'-phosphate
  modified_base 6: mod_base = OTHER; note = 2'-O-methylguanosine-3'-phosphate
  modified_base 7: mod_base = OTHER; note = guanosine-2'-phosphate
  modified_base 8: mod_base = OTHER; note = 2'-O-methyladenosine-3'-phosphate
  modified_base 9: mod_base = OTHER; note = 2'-O-methyladenosine-3'-phosphate
  modified_base 10: mod_base = OTHER; note = 2'-O-methylguanosine-3'-phosphate
  modified_base 11: mod_base = OTHER; note = 2'-O-methyluridine-3'-phosphate
  modified_base 12: mod_base = OTHER; note = 2'-O-methylguanosine-3'-phosphate
  modified_base 13: mod_base = OTHER; note = 2'-O-methylguanosine-3'-phosphate
  modified_base 14: mod_base = OTHER; note = 2'-fluorocytidine-3'-phosphate
  modified_base 15: mod_base = OTHER; note = 2'-O-methyladenosine-3'-phosphate
  modified_base 16: mod_base = OTHER; note = 2'-fluorocytidine-3'-phosphate
  modified_base 17: mod_base = OTHER; note = 2'-O-methyluridine-3'-phosphate
  modified_base 18: mod_base = OTHER; note = 2'-O-methylguanosine-3'-phosphate
  modified_base 19: mod_base = OTHER; note = 2'-O-methyladenosine-3'-phosphate
  modified_base 20: mod_base = OTHER; note = 2'-O-methylguanosine-3'-phosphate
  modified_base 21: mod_base = OTHER; note = 2'-O-methylcytidine-3'- phosphorothioate
  modified_base 22: mod_base = OTHER; note = 2'-O-methyladenosine-3'- phosphorothioate
  modified_base 23: mod_base = OTHER; note = 2'-O-methyladenosine-3'-phosphate
  misc_feature 1..4: note = RNA
  misc_feature 5: note = DNA
  misc_feature 6..23: note = RNA
tagagggaagtggcactgagcaa

SEQ ID NO: 1382 - DNA, 23 bp, synthetic construct
  source 1..23: mol_type = other DNA
  modified_base 1: mod_base = OTHER; note = Vinyl-phosphonate 2'-O-methyluridine-3'-phosphorothioate
  modified_base 2: mod_base = OTHER; note = 2'-fluoroadenosine-3'-phosphorothioate
  modified_base 3: mod_base = OTHER; note = 2'-O-methyladenosine-3'-phosphate
  modified_base 4: mod_base = OTHER; note = 2'-O-methylguanosine-3'-phosphate
  modified_base 6: mod_base = OTHER; note = 2'-O-methylguanosine-3'-phosphate
  modified_base 7: mod_base = OTHER; note = guanosine-2'-phosphate
  modified_base 8: mod_base = OTHER; note = 2'-O-methylguanosine-3'-phosphate
  modified_base 9: mod_base = OTHER; note = 2'-O-methyladenosine-3'-phosphate
  modified_base 10: mod_base = OTHER; note = 2'-O-methyladenosine-3'-phosphate
  modified_base 11: mod_base = OTHER; note = 2'-O-methylguanosine-3'-phosphate
  modified_base 12: mod_base = OTHER; note = 2'-O-methyluridine-3'-phosphate
  modified_base 13: mod_base = OTHER; note = 2'-O-methylguanosine-3'-phosphate
  modified_base 14: mod_base = OTHER; note = 2'-fluoroguanosine-3'-phosphate
  modified_base 15: mod_base = OTHER; note = 2'-O-methylcytidine-3'-phosphate
  modified_base 16: mod_base = OTHER; note = 2'-fluoroadenosine-3'-phosphate
  modified_base 17: mod_base = OTHER; note = 2'-O-methylcytidine-3'-phosphate
  modified_base 18: mod_base = OTHER; note = 2'-O-methyluridine-3'-phosphate
  modified_base 19: mod_base = OTHER; note = 2'-O-methylguanosine-3'-phosphate
  modified_base 20: mod_base = OTHER; note = 2'-O-methyladenosine-3'-phosphate
  modified_base 21: mod_base = OTHER; note = 2'-O-methylguanosine-3'- phosphorothioate
  modified_base 22: mod_base = OTHER; note = 2'-O-methylcytidine-3'- phosphorothioate
  modified_base 23: mod_base = OTHER; note = 2'-O-methyladenosine-3'-phosphate
  misc_feature 1..4: note = RNA
  misc_feature 5: note = DNA
  misc_feature 6..23: note = RNA
taagagggaagtggcactgagca

SEQ ID NO: 1383 - DNA, 23 bp, synthetic construct
  source 1..23: mol_type = other DNA
  modified_base 1: mod_base = OTHER; note = Vinyl-phosphonate 2'-O-methyluridine-3'-phosphorothioate
  modified_base 2: mod_base = OTHER; note = 2'-fluorouridine -3'-phosphorothioate
  modified_base 3: mod_base = OTHER; note = 2'-O-methyladenosine-3'-phosphate
  modified_base 4: mod_base = OTHER; note = 2'-O-methylguanosine-3'-phosphate
  modified_base 6: mod_base = OTHER; note = 2'-O-methyladenosine-3'-phosphate
  modified_base 7: mod_base = OTHER; note = guanosine-2'-phosphate
  modified_base 8: mod_base = OTHER; note = 2'-O-methyladenosine-3'-phosphate
  modified_base 9: mod_base = OTHER; note = 2'-O-methylguanosine-3'-phosphate
  modified_base 10: mod_base = OTHER; note = 2'-O-methylguanosine-3'-phosphate
  modified_base 11: mod_base = OTHER; note = 2'-O-methylguanosine-3'-phosphate
  modified_base 12: mod_base = OTHER; note = 2'-O-methyladenosine-3'-phosphate
  modified_base 13: mod_base = OTHER; note = 2'-O-methyladenosine-3'-phosphate
  modified_base 14: mod_base = OTHER; note = 2'-fluoroguanosine-3'-phosphate
  modified_base 15: mod_base = OTHER; note = 2'-O-methyluridine-3'-phosphate
  modified_base 16: mod_base = OTHER; note = 2'-fluoroguanosine-3'-phosphate
  modified_base 17: mod_base = OTHER; note = 2'-O-methylguanosine-3'-phosphate
  modified_base 18: mod_base = OTHER; note = 2'-O-methylcytidine-3'-phosphate
  modified_base 19: mod_base = OTHER; note = 2'-O-methyladenosine-3'-phosphate
  modified_base 20: mod_base = OTHER; note = 2'-O-methylcytidine-3'-phosphate
  modified_base 21: mod_base = OTHER; note = 2'-O-methyluridine-3'-phosphorothioate
  modified_base 22: mod_base = OTHER; note = 2'-O-methylguanosine-3'- phosphorothioate
  modified_base 23: mod_base = OTHER; note = 2'-O-methyladenosine-3'-phosphate
  misc_feature 1..4: note = RNA
  misc_feature 5: note = DNA
  misc_feature 6..23: note = RNA
ttagaagagggaagtggcactga

SEQ ID NO: 1384 - DNA, 23 bp, synthetic construct
  source 1..23: mol_type = other DNA
  modified_base 1: mod_base = OTHER; note = Vinyl-phosphonate 2'-O-methyluridine-3'-phosphorothioate
  modified_base 2: mod_base = OTHER; note = 2'-fluoroguanosine-3'-phosphorothioate
  modified_base 3: mod_base = OTHER; note = 2'-O-methyladenosine-3'-phosphate
  modified_base 4: mod_base = OTHER; note = 2'-O-methylcytidine-3'-phosphate
  modified_base 6: mod_base = OTHER; note = 2'-O-methyladenosine-3'-phosphate
  modified_base 7: mod_base = OTHER; note = guanosine-2'-phosphate
  modified_base 8: mod_base = OTHER; note = 2'-O-methyladenosine-3'-phosphate
  modified_base 9: mod_base = OTHER; note = 2'-O-methyladenosine-3'-phosphate
  modified_base 10: mod_base = OTHER; note = 2'-O-methylguanosine-3'-phosphate
  modified_base 11: mod_base = OTHER; note = 2'-O-methyladenosine-3'-phosphate
  modified_base 12: mod_base = OTHER; note = 2'-O-methylguanosine-3'-phosphate
  modified_base 13: mod_base = OTHER; note = 2'-O-methylguanosine-3'-phosphate
  modified_base 14: mod_base = OTHER; note = 2'-fluoroguanosine-3'-phosphate
  modified_base 15: mod_base = OTHER; note = 2'-O-methyladenosine-3'-phosphate
  modified_base 16: mod_base = OTHER; note = 2'-fluoroadenosine-3'-phosphate
  modified_base 17: mod_base = OTHER; note = 2'-O-methylguanosine-3'-phosphate
  modified_base 18: mod_base = OTHER; note = 2'-O-methyluridine-3'-phosphate
  modified_base 19: mod_base = OTHER; note = 2'-O-methylguanosine-3'-phosphate
  modified_base 20: mod_base = OTHER; note = 2'-O-methylguanosine-3'-phosphate
  modified_base 21: mod_base = OTHER; note = 2'-O-methylcytidine-3'- phosphorothioate
  modified_base 22: mod_base = OTHER; note = 2'-O-methyladenosine-3'- phosphorothioate
  modified_base 23: mod_base = OTHER; note = 2'-O-methylcytidine-3'-phosphate
  misc_feature 1..4: note = RNA
  misc_feature 5: note = DNA
  misc_feature 6..23: note = RNA
tgactagaagagggaagtggcac

SEQ ID NO: 1385 - DNA, 23 bp, synthetic construct
  source 1..23: mol_type = other DNA
  modified_base 1: mod_base = OTHER; note = Vinyl-phosphonate 2'-O-methyluridine-3'-phosphorothioate
  modified_base 2: mod_base = OTHER; note = 2'-fluorouridine -3'-phosphorothioate
  modified_base 3: mod_base = OTHER; note = 2'-O-methylcytidine-3'-phosphate
  modified_base 4: mod_base = OTHER; note = 2'-O-methyladenosine-3'-phosphate
  modified_base 6: mod_base = OTHER; note = 2'-O-methyladenosine-3'-phosphate
  modified_base 7: mod_base = OTHER; note = cytidine-2'-phosphate
  modified_base 8: mod_base = OTHER; note = 2'-O-methyluridine-3'-phosphate
  modified_base 9: mod_base = OTHER; note = 2'-O-methyladenosine-3'-phosphate
  modified_base 10: mod_base = OTHER; note = 2'-O-methylguanosine-3'-phosphate
  modified_base 11: mod_base = OTHER; note = 2'-O-methyladenosine-3'-phosphate
  modified_base 12: mod_base = OTHER; note = 2'-O-methyladenosine-3'-phosphate
  modified_base 13: mod_base = OTHER; note = 2'-O-methylguanosine-3'-phosphate
  modified_base 14: mod_base = OTHER; note = 2'-fluoroadenosine-3'-phosphate
  modified_base 15: mod_base = OTHER; note = 2'-O-methylguanosine-3'-phosphate
  modified_base 16: mod_base = OTHER; note = 2'-fluoroguanosine-3'-phosphate
  modified_base 17: mod_base = OTHER; note = 2'-O-methylguanosine-3'-phosphate
  modified_base 18: mod_base = OTHER; note = 2'-O-methyladenosine-3'-phosphate
  modified_base 19: mod_base = OTHER; note = 2'-O-methyladenosine-3'-phosphate
  modified_base 20: mod_base = OTHER; note = 2'-O-methylguanosine-3'-phosphate
  modified_base 21: mod_base = OTHER; note = 2'-O-methyluridine-3'-phosphorothioate
  modified_base 22: mod_base = OTHER; note = 2'-O-methylguanosine-3'- phosphorothioate
  modified_base 23: mod_base = OTHER; note = 2'-O-methylguanosine-3'-phosphate
  misc_feature 1..4: note = RNA
  misc_feature 5: note = DNA
  misc_feature 6..23: note = RNA
ttcagactagaagagggaagtgg

SEQ ID NO: 1386 - DNA, 23 bp, synthetic construct
  source 1..23: mol_type = other DNA
  modified_base 1: mod_base = OTHER; note = Vinyl-phosphonate 2'-O-methyluridine-3'-phosphorothioate
  modified_base 2: mod_base = OTHER; note = 2'-fluorouridine -3'-phosphorothioate
  modified_base 3: mod_base = OTHER; note = 2'-O-methylcytidine-3'-phosphate
  modified_base 4: mod_base = OTHER; note = 2'-O-methyluridine-3'-phosphate
  modified_base 6: mod_base = OTHER; note = 2'-O-methyladenosine-3'-phosphate
  modified_base 7: mod_base = OTHER; note = guanosine-2'-phosphate
  modified_base 8: mod_base = OTHER; note = 2'-O-methyladenosine-3'-phosphate
  modified_base 9: mod_base = OTHER; note = 2'-O-methylcytidine-3'-phosphate
  modified_base 10: mod_base = OTHER; note = 2'-O-methyluridine-3'-phosphate
  modified_base 11: mod_base = OTHER; note = 2'-O-methyladenosine-3'-phosphate
  modified_base 12: mod_base = OTHER; note = 2'-O-methylguanosine-3'-phosphate
  modified_base 13: mod_base = OTHER; note = 2'-O-methyladenosine-3'-phosphate
  modified_base 14: mod_base = OTHER; note = 2'-fluoroadenosine-3'-phosphate
  modified_base 15: mod_base = OTHER; note = 2'-O-methylguanosine-3'-phosphate
  modified_base 16: mod_base = OTHER; note = 2'-fluoroadenosine-3'-phosphate
  modified_base 17: mod_base = OTHER; note = 2'-O-methylguanosine-3'-phosphate
  modified_base 18: mod_base = OTHER; note = 2'-O-methylguanosine-3'-phosphate
  modified_base 19: mod_base = OTHER; note = 2'-O-methylguanosine-3'-phosphate
  modified_base 20: mod_base = OTHER; note = 2'-O-methyladenosine-3'-phosphate
  modified_base 21: mod_base = OTHER; note = 2'-O-methyladenosine-3'- phosphorothioate
  modified_base 22: mod_base = OTHER; note = 2'-O-methylguanosine-3'- phosphorothioate
  modified_base 23: mod_base = OTHER; note = 2'-O-methyluridine-3'-phosphate
  misc_feature 1..4: note = RNA
  misc_feature 5: note = DNA
  misc_feature 6..23: note = RNA
ttctcagactagaagagggaagt

SEQ ID NO: 1387 - DNA, 23 bp, synthetic construct
  source 1..23: mol_type = other DNA
  modified_base 1: mod_base = OTHER; note = Vinyl-phosphonate 2'-O-methyluridine-3'-phosphorothioate
  modified_base 2: mod_base = OTHER; note = 2'-fluorocytidine-3'-phosphorothioate
  modified_base 3: mod_base = OTHER; note = 2'-O-methylcytidine-3'-phosphate
  modified_base 4: mod_base = OTHER; note = 2'-O-methyluridine-3'-phosphate
  modified_base 6: mod_base = OTHER; note = 2'-O-methyluridine-3'-phosphate
  modified_base 7: mod_base = OTHER; note = cytidine-2'-phosphate
  modified_base 8: mod_base = OTHER; note = 2'-O-methyladenosine-3'-phosphate
  modified_base 9: mod_base = OTHER; note = 2'-O-methylguanosine-3'-phosphate
  modified_base 10: mod_base = OTHER; note = 2'-O-methyladenosine-3'-phosphate
  modified_base 11: mod_base = OTHER; note = 2'-O-methylcytidine-3'-phosphate
  modified_base 12: mod_base = OTHER; note = 2'-O-methyluridine-3'-phosphate
  modified_base 13: mod_base = OTHER; note = 2'-O-methyladenosine-3'-phosphate
  modified_base 14: mod_base = OTHER; note = 2'-fluoroguanosine-3'-phosphate
  modified_base 15: mod_base = OTHER; note = 2'-O-methyladenosine-3'-phosphate
  modified_base 16: mod_base = OTHER; note = 2'-fluoroadenosine-3'-phosphate
  modified_base 17: mod_base = OTHER; note = 2'-O-methylguanosine-3'-phosphate
  modified_base 18: mod_base = OTHER; note = 2'-O-methyladenosine-3'-phosphate
  modified_base 19: mod_base = OTHER; note = 2'-O-methylguanosine-3'-phosphate
  modified_base 20: mod_base = OTHER; note = 2'-O-methylguanosine-3'-phosphate
  modified_base 21: mod_base = OTHER; note = 2'-O-methylguanosine-3'- phosphorothioate
  modified_base 22: mod_base = OTHER; note = 2'-O-methyladenosine-3'- phosphorothioate
  modified_base 23: mod_base = OTHER; note = 2'-O-methyladenosine-3'-phosphate
  misc_feature 1..4: note = RNA
  misc_feature 5: note = DNA
  misc_feature 6..23: note = RNA
tcctctcagactagaagagggaa

SEQ ID NO: 1388 - DNA, 23 bp, synthetic construct
  source 1..23: mol_type = other DNA
  modified_base 1: mod_base = OTHER; note = Vinyl-phosphonate 2'-O-methyluridine-3'-phosphorothioate
  modified_base 2: mod_base = OTHER; note = 2'-fluorouridine -3'-phosphorothioate
  modified_base 3: mod_base = OTHER; note = 2'-O-methylcytidine-3'-phosphate
  modified_base 4: mod_base = OTHER; note = 2'-O-methylcytidine-3'-phosphate
  modified_base 6: mod_base = OTHER; note = 2'-O-methyluridine-3'-phosphate
  modified_base 7: mod_base = OTHER; note = cytidine-2'-phosphate
  modified_base 8: mod_base = OTHER; note = 2'-O-methyluridine-3'-phosphate
  modified_base 9: mod_base = OTHER; note = 2'-O-methylcytidine-3'-phosphate
  modified_base 10: mod_base = OTHER; note = 2'-O-methyladenosine-3'-phosphate
  modified_base 11: mod_base = OTHER; note = 2'-O-methylguanosine-3'-phosphate
  modified_base 12: mod_base = OTHER; note = 2'-O-methyladenosine-3'-phosphate
  modified_base 13: mod_base = OTHER; note = 2'-O-methylcytidine-3'-phosphate
  modified_base 14: mod_base = OTHER; note = 2'-fluorouridine-3'-phosphate
  modified_base 15: mod_base = OTHER; note = 2'-O-methyladenosine-3'-phosphate
  modified_base 16: mod_base = OTHER; note = 2'-fluoroguanosine-3'-phosphate
  modified_base 17: mod_base = OTHER; note = 2'-O-methyladenosine-3'-phosphate
  modified_base 18: mod_base = OTHER; note = 2'-O-methyladenosine-3'-phosphate
  modified_base 19: mod_base = OTHER; note = 2'-O-methylguanosine-3'-phosphate
  modified_base 20: mod_base = OTHER; note = 2'-O-methyladenosine-3'-phosphate
  modified_base 21: mod_base = OTHER; note = 2'-O-methylguanosine-3'- phosphorothioate
  modified_base 22: mod_base = OTHER; note = 2'-O-methylguanosine-3'- phosphorothioate
  modified_base 23: mod_base = OTHER; note = 2'-O-methylguanosine-3'-phosphate
  misc_feature 1..4: note = RNA
  misc_feature 5: note = DNA
  misc_feature 6..23: note = RNA
ttccctctcagactagaagaggg

SEQ ID NO: 1389 - DNA, 23 bp, synthetic construct
  source 1..23: mol_type = other DNA
  modified_base 1: mod_base = OTHER; note = Vinyl-phosphonate 2'-O-methyluridine-3'-phosphorothioate
  modified_base 2: mod_base = OTHER; note = 2'-fluorocytidine-3'-phosphorothioate
  modified_base 3: mod_base = OTHER; note = 2'-O-methyluridine-3'-phosphate
  modified_base 4: mod_base = OTHER; note = 2'-O-methyluridine-3'-phosphate
  modified_base 6: mod_base = OTHER; note = 2'-O-methylcytidine-3'-phosphate
  modified_base 7: mod_base = OTHER; note = cytidine-2'-phosphate
  modified_base 8: mod_base = OTHER; note = 2'-O-methyluridine-3'-phosphate
  modified_base 9: mod_base = OTHER; note = 2'-O-methylcytidine-3'-phosphate
  modified_base 10: mod_base = OTHER; note = 2'-O-methyluridine-3'-phosphate
  modified_base 11: mod_base = OTHER; note = 2'-O-methylcytidine-3'-phosphate
  modified_base 12: mod_base = OTHER; note = 2'-O-methyladenosine-3'-phosphate
  modified_base 13: mod_base = OTHER; note = 2'-O-methylguanosine-3'-phosphate
  modified_base 14: mod_base = OTHER; note = 2'-fluoroadenosine-3'-phosphate
  modified_base 15: mod_base = OTHER; note = 2'-O-methylcytidine-3'-phosphate
  modified_base 16: mod_base = OTHER; note = 2'-fluorouridine-3'-phosphate
  modified_base 17: mod_base = OTHER; note = 2'-O-methyladenosine-3'-phosphate
  modified_base 18: mod_base = OTHER; note = 2'-O-methylguanosine-3'-phosphate
  modified_base 19: mod_base = OTHER; note = 2'-O-methyladenosine-3'-phosphate
  modified_base 20: mod_base = OTHER; note = 2'-O-methyladenosine-3'-phosphate
  modified_base 21: mod_base = OTHER; note = 2'-O-methylguanosine-3'- phosphorothioate
  modified_base 22: mod_base = OTHER; note = 2'-O-methyladenosine-3'- phosphorothioate
  modified_base 23: mod_base = OTHER; note = 2'-O-methylguanosine-3'-phosphate
  misc_feature 1..4: note = RNA
  misc_feature 5: note = DNA
  misc_feature 6..23: note = RNA
tcttccctctcagactagaagag

SEQ ID NO: 1390 - DNA, 23 bp, synthetic construct
  source 1..23: mol_type = other DNA
  modified_base 1: mod_base = OTHER; note = Vinyl-phosphonate 2'-O-methyluridine-3'-phosphorothioate
  modified_base 2: mod_base = OTHER; note = 2'-fluorouridine -3'-phosphorothioate
  modified_base 3: mod_base = OTHER; note = 2'-O-methylcytidine-3'-phosphate
  modified_base 4: mod_base = OTHER; note = 2'-O-methyluridine-3'-phosphate
  modified_base 6: mod_base = OTHER; note = 2'-O-methylcytidine-3'-phosphate
  modified_base 7: mod_base = OTHER; note = cytidine-2'-phosphate
  modified_base 8: mod_base = OTHER; note = 2'-O-methylcytidine-3'-phosphate
  modified_base 9: mod_base = OTHER; note = 2'-O-methyluridine-3'-phosphate
  modified_base 10: mod_base = OTHER; note = 2'-O-methylcytidine-3'-phosphate
  modified_base 11: mod_base = OTHER; note = 2'-O-methyluridine-3'-phosphate
  modified_base 12: mod_base = OTHER; note = 2'-O-methylcytidine-3'-phosphate
  modified_base 13: mod_base = OTHER; note = 2'-O-methyladenosine-3'-phosphate
  modified_base 14: mod_base = OTHER; note = 2'-fluoroguanosine-3'-phosphate
  modified_base 15: mod_base = OTHER; note = 2'-O-methyladenosine-3'-phosphate
  modified_base 16: mod_base = OTHER; note = 2'-fluorocytidine-3'-phosphate
  modified_base 17: mod_base = OTHER; note = 2'-O-methyluridine-3'-phosphate
  modified_base 18: mod_base = OTHER; note = 2'-O-methyladenosine-3'-phosphate
  modified_base 19: mod_base = OTHER; note = 2'-O-methylguanosine-3'-phosphate
  modified_base 20: mod_base = OTHER; note = 2'-O-methyladenosine-3'-phosphate
  modified_base 21: mod_base = OTHER; note = 2'-O-methyladenosine-3'- phosphorothioate
  modified_base 22: mod_base = OTHER; note = 2'-O-methylguanosine-3'- phosphorothioate
  modified_base 23: mod_base = OTHER; note = 2'-O-methyladenosine-3'-phosphate
  misc_feature 1..4: note = RNA
  misc_feature 5: note = DNA
  misc_feature 6..23: note = RNA
ttcttccctctcagactagaaga

SEQ ID NO: 1391 - DNA, 23 bp, synthetic construct
  source 1..23: mol_type = other DNA
  modified_base 1: mod_base = OTHER; note = Vinyl-phosphonate 2'-O-methyluridine-3'-phosphorothioate
  modified_base 2: mod_base = OTHER; note = 2'-fluoroguanosine-3'-phosphorothioate
  modified_base 3: mod_base = OTHER; note = 2'-O-methylcytidine-3'-phosphate
  modified_base 4: mod_base = OTHER; note = 2'-O-methylcytidine-3'-phosphate
  modified_base 6: mod_base = OTHER; note = 2'-O-methyluridine-3'-phosphate
  modified_base 7: mod_base = OTHER; note = cytidine-2'-phosphate
  modified_base 8: mod_base = OTHER; note = 2'-O-methyluridine-3'-phosphate
  modified_base 9: mod_base = OTHER; note = 2'-O-methyluridine-3'-phosphate
  modified_base 10: mod_base = OTHER; note = 2'-O-methylcytidine-3'-phosphate
  modified_base 11: mod_base = OTHER; note = 2'-O-methylcytidine-3'-phosphate
  modified_base 12: mod_base = OTHER; note = 2'-O-methylcytidine-3'-phosphate
  modified_base 13: mod_base = OTHER; note = 2'-O-methyluridine-3'-phosphate
  modified_base 14: mod_base = OTHER; note = 2'-fluorocytidine-3'-phosphate
  modified_base 15: mod_base = OTHER; note = 2'-O-methyluridine-3'-phosphate
  modified_base 16: mod_base = OTHER; note = 2'-fluorocytidine-3'-phosphate
  modified_base 17: mod_base = OTHER; note = 2'-O-methyladenosine-3'-phosphate
  modified_base 18: mod_base = OTHER; note = 2'-O-methylguanosine-3'-phosphate
  modified_base 19: mod_base = OTHER; note = 2'-O-methyladenosine-3'-phosphate
  modified_base 20: mod_base = OTHER; note = 2'-O-methylcytidine-3'-phosphate
  modified_base 21: mod_base = OTHER; note = 2'-O-methyluridine-3'-phosphorothioate
  modified_base 22: mod_base = OTHER; note = 2'-O-methyladenosine-3'- phosphorothioate
  modified_base 23: mod_base = OTHER; note = 2'-O-methylguanosine-3'-phosphate
  misc_feature 1..4: note = RNA
  misc_feature 5: note = DNA
  misc_feature 6..23: note = RNA
tgccctcttccctctcagactag

SEQ ID NO: 1392 - DNA, 23 bp, synthetic construct
  source 1..23: mol_type = other DNA
  modified_base 1: mod_base = OTHER; note = Vinyl-phosphonate 2'-O-methyluridine-3'-phosphorothioate
  modified_base 2: mod_base = OTHER; note = 2'-fluorocytidine-3'-phosphorothioate
  modified_base 3: mod_base = OTHER; note = 2'-O-methyladenosine-3'-phosphate
  modified_base 4: mod_base = OTHER; note = 2'-O-methylguanosine-3'-phosphate
  modified_base 6: mod_base = OTHER; note = 2'-O-methylcytidine-3'-phosphate
  modified_base 7: mod_base = OTHER; note = cytidine-2'-phosphate
  modified_base 8: mod_base = OTHER; note = 2'-O-methyluridine-3'-phosphate
  modified_base 9: mod_base = OTHER; note = 2'-O-methylcytidine-3'-phosphate
  modified_base 10: mod_base = OTHER; note = 2'-O-methyluridine-3'-phosphate
  modified_base 11: mod_base = OTHER; note = 2'-O-methyluridine-3'-phosphate
  modified_base 12: mod_base = OTHER; note = 2'-O-methylcytidine-3'-phosphate
  modified_base 13: mod_base = OTHER; note = 2'-O-methylcytidine-3'-phosphate
  modified_base 14: mod_base = OTHER; note = 2'-fluorocytidine-3'-phosphate
  modified_base 15: mod_base = OTHER; note = 2'-O-methyluridine-3'-phosphate
  modified_base 16: mod_base = OTHER; note = 2'-fluorocytidine-3'-phosphate
  modified_base 17: mod_base = OTHER; note = 2'-O-methyluridine-3'-phosphate
  modified_base 18: mod_base = OTHER; note = 2'-O-methylcytidine-3'-phosphate
  modified_base 19: mod_base = OTHER; note = 2'-O-methyladenosine-3'-phosphate
  modified_base 20: mod_base = OTHER; note = 2'-O-methylguanosine-3'-phosphate
  modified_base 21: mod_base = OTHER; note = 2'-O-methyladenosine-3'- phosphorothioate
  modified_base 22: mod_base = OTHER; note = 2'-O-methylcytidine-3'- phosphorothioate
  modified_base 23: mod_base = OTHER; note = 2'-O-methyluridine-3'-phosphate
  misc_feature 1..4: note = RNA
  misc_feature 5: note = DNA
  misc_feature 6..23: note = RNA
tcagccctcttccctctcagact

SEQ ID NO: 1393 - DNA, 23 bp, synthetic construct
  source 1..23: mol_type = other DNA
  modified_base 1: mod_base = OTHER; note = Vinyl-phosphonate 2'-O-methyluridine-3'-phosphorothioate
  modified_base 2: mod_base = OTHER; note = 2'-fluorocytidine-3'-phosphorothioate
  modified_base 3: mod_base = OTHER; note = 2'-O-methylcytidine-3'-phosphate
  modified_base 4: mod_base = OTHER; note = 2'-O-methyladenosine-3'-phosphate
  modified_base 6: mod_base = OTHER; note = 2'-O-methylcytidine-3'-phosphate
  modified_base 7: mod_base = OTHER; note = cytidine-2'-phosphate
  modified_base 8: mod_base = OTHER; note = 2'-O-methylcytidine-3'-phosphate
  modified_base 9: mod_base = OTHER; note = 2'-O-methyluridine-3'-phosphate
  modified_base 10: mod_base = OTHER; note = 2'-O-methylcytidine-3'-phosphate
  modified_base 11: mod_base = OTHER; note = 2'-O-methyluridine-3'-phosphate
  modified_base 12: mod_base = OTHER; note = 2'-O-methyluridine-3'-phosphate
  modified_base 13: mod_base = OTHER; note = 2'-O-methylcytidine-3'-phosphate
  modified_base 14: mod_base = OTHER; note = 2'-fluorocytidine-3'-phosphate
  modified_base 15: mod_base = OTHER; note = 2'-O-methylcytidine-3'-phosphate
  modified_base 16: mod_base = OTHER; note = 2'-fluorouridine-3'-phosphate
  modified_base 17: mod_base = OTHER; note = 2'-O-methylcytidine-3'-phosphate
  modified_base 18: mod_base = OTHER; note = 2'-O-methyluridine-3'-phosphate
  modified_base 19: mod_base = OTHER; note = 2'-O-methylcytidine-3'-phosphate
  modified_base 20: mod_base = OTHER; note = 2'-O-methyladenosine-3'-phosphate
  modified_base 21: mod_base = OTHER; note = 2'-O-methylguanosine-3'- phosphorothioate
  modified_base 22: mod_base = OTHER; note = 2'-O-methyladenosine-3'- phosphorothioate
  modified_base 23: mod_base = OTHER; note = 2'-O-methylcytidine-3'-phosphate
  misc_feature 1..4: note = RNA
  misc_feature 5: note = DNA
  misc_feature 6..23: note = RNA
tccagccctcttccctctcagac

SEQ ID NO: 1394 - DNA, 23 bp, synthetic construct
  source 1..23: mol_type = other DNA
  modified_base 1: mod_base = OTHER; note = Vinyl-phosphonate 2'-O-methyluridine-3'-phosphorothioate
  modified_base 2: mod_base = OTHER; note = 2'-fluorocytidine-3'-phosphorothioate
  modified_base 3: mod_base = OTHER; note = 2'-O-methyladenosine-3'-phosphate
  modified_base 4: mod_base = OTHER; note = 2'-O-methylcytidine-3'-phosphate
  modified_base 6: mod_base = OTHER; note = 2'-O-methyluridine-3'-phosphate
  modified_base 7: mod_base = OTHER; note = cytidine-2'-phosphate
  modified_base 8: mod_base = OTHER; note = 2'-O-methyluridine-3'-phosphate
  modified_base 9: mod_base = OTHER; note = 2'-O-methylcytidine-3'-phosphate
  modified_base 10: mod_base = OTHER; note = 2'-O-methyluridine-3'-phosphate
  modified_base 11: mod_base = OTHER; note = 2'-O-methylcytidine-3'-phosphate
  modified_base 12: mod_base = OTHER; note = 2'-O-methylcytidine-3'-phosphate
  modified_base 13: mod_base = OTHER; note = 2'-O-methyladenosine-3'-phosphate
  modified_base 14: mod_base = OTHER; note = 2'-fluoroguanosine-3'-phosphate
  modified_base 15: mod_base = OTHER; note = 2'-O-methylcytidine-3'-phosphate
  modified_base 16: mod_base = OTHER; note = 2'-fluorouridine-3'-phosphate
  modified_base 17: mod_base = OTHER; note = 2'-O-methylcytidine-3'-phosphate
  modified_base 18: mod_base = OTHER; note = 2'-O-methylcytidine-3'-phosphate
  modified_base 19: mod_base = OTHER; note = 2'-O-methyladenosine-3'-phosphate
  modified_base 20: mod_base = OTHER; note = 2'-O-methyladenosine-3'-phosphate
  modified_base 21: mod_base = OTHER; note = 2'-O-methyladenosine-3'- phosphorothioate
  modified_base 22: mod_base = OTHER; note = 2'-O-methylcytidine-3'- phosphorothioate
  modified_base 23: mod_base = OTHER; note = 2'-O-methylcytidine-3'-phosphate
  misc_feature 1..4: note = RNA
  misc_feature 5: note = DNA
  misc_feature 6..23: note = RNA
tcacatctctccagctccaaacc

SEQ ID NO: 1395 - DNA, 23 bp, synthetic construct
  source 1..23: mol_type = other DNA
  modified_base 1: mod_base = OTHER; note = Vinyl-phosphonate 2'-O-methyluridine-3'-phosphorothioate
  modified_base 2: mod_base = OTHER; note = 2'-fluoroadenosine-3'-phosphorothioate
  modified_base 3: mod_base = OTHER; note = 2'-O-methylcytidine-3'-phosphate
  modified_base 4: mod_base = OTHER; note = 2'-O-methyluridine-3'-phosphate
  modified_base 6: mod_base = OTHER; note = 2'-O-methylcytidine-3'-phosphate
  modified_base 7: mod_base = OTHER; note = cytidine-2'-phosphate
  modified_base 8: mod_base = OTHER; note = 2'-O-methylguanosine-3'-phosphate
  modified_base 9: mod_base = OTHER; note = 2'-O-methylcytidine-3'-phosphate
  modified_base 10: mod_base = OTHER; note = 2'-O-methylcytidine-3'-phosphate
  modified_base 11: mod_base = OTHER; note = 2'-O-methylguanosine-3'-phosphate
  modified_base 12: mod_base = OTHER; note = 2'-O-methyladenosine-3'-phosphate
  modified_base 13: mod_base = OTHER; note = 2'-O-methylguanosine-3'-phosphate
  modified_base 14: mod_base = OTHER; note = 2'-fluoroguanosine-3'-phosphate
  modified_base 15: mod_base = OTHER; note = 2'-O-methylcytidine-3'-phosphate
  modified_base 16: mod_base = OTHER; note = 2'-fluoroguanosine-3'-phosphate
  modified_base 17: mod_base = OTHER; note = 2'-O-methyluridine-3'-phosphate
  modified_base 18: mod_base = OTHER; note = 2'-O-methylcytidine-3'-phosphate
  modified_base 19: mod_base = OTHER; note = 2'-O-methylcytidine-3'-phosphate
  modified_base 20: mod_base = OTHER; note = 2'-O-methyluridine-3'-phosphate
  modified_base 21: mod_base = OTHER; note = 2'-O-methyladenosine-3'- phosphorothioate
  modified_base 22: mod_base = OTHER; note = 2'-O-methyladenosine-3'- phosphorothioate
  modified_base 23: mod_base = OTHER; note = 2'-O-methyladenosine-3'-phosphate
  misc_feature 1..4: note = RNA
  misc_feature 5: note = DNA
  misc_feature 6..23: note = RNA
tactcccgccgaggcgtcctaaa

SEQ ID NO: 1396 - DNA, 23 bp, synthetic construct
  source 1..23: mol_type = other DNA
  modified_base 1: mod_base = OTHER; note = Vinyl-phosphonate 2'-O-methyluridine-3'-phosphorothioate
  modified_base 2: mod_base = OTHER; note = 2'-fluorouridine -3'-phosphorothioate
  modified_base 3: mod_base = OTHER; note = 2'-O-methylcytidine-3'-phosphate
  modified_base 4: mod_base = OTHER; note = 2'-O-methyluridine-3'-phosphate
  modified_base 6: mod_base = OTHER; note = 2'-O-methylcytidine-3'-phosphate
  modified_base 7: mod_base = OTHER; note = cytidine-2'-phosphate
  modified_base 8: mod_base = OTHER; note = 2'-O-methyladenosine-3'-phosphate
  modified_base 9: mod_base = OTHER; note = 2'-O-methyluridine-3'-phosphate
  modified_base 10: mod_base = OTHER; note = 2'-O-methyluridine-3'-phosphate
  modified_base 11: mod_base = OTHER; note = 2'-O-methylguanosine-3'-phosphate
  modified_base 12: mod_base = OTHER; note = 2'-O-methylguanosine-3'-phosphate
  modified_base 13: mod_base = OTHER; note = 2'-O-methyladenosine-3'-phosphate
  modified_base 14: mod_base = OTHER; note = 2'-fluorocytidine-3'-phosphate
  modified_base 15: mod_base = OTHER; note = 2'-O-methylguanosine-3'-phosphate
  modified_base 16: mod_base = OTHER; note = 2'-fluorocytidine-3'-phosphate
  modified_base 17: mod_base = OTHER; note = 2'-O-methylguanosine-3'-phosphate
  modified_base 18: mod_base = OTHER; note = 2'-O-methylcytidine-3'-phosphate
  modified_base 19: mod_base = OTHER; note = 2'-O-methylcytidine-3'-phosphate
  modified_base 20: mod_base = OTHER; note = 2'-O-methylcytidine-3'-phosphate
  modified_base 21: mod_base = OTHER; note = 2'-O-methyluridine-3'-phosphorothioate
  modified_base 22: mod_base = OTHER; note = 2'-O-methylcytidine-3'- phosphorothioate
  modified_base 23: mod_base = OTHER; note = 2'-O-methyladenosine-3'-phosphate
  misc_feature 1..4: note = RNA
  misc_feature 5: note = DNA
  misc_feature 6..23: note = RNA
ttctcccattggacgcgccctca

SEQ ID NO: 1397 - DNA, 23 bp, synthetic construct
  source 1..23: mol_type = other DNA
  modified_base 1: mod_base = OTHER; note = Vinyl-phosphonate 2'-O-methyluridine-3'-phosphorothioate
  modified_base 2: mod_base = OTHER; note = 2'-fluoroadenosine-3'-phosphorothioate
  modified_base 3: mod_base = OTHER; note = 2'-O-methyluridine-3'-phosphate
  modified_base 4: mod_base = OTHER; note = 2'-O-methylcytidine-3'-phosphate
  modified_base 6: mod_base = OTHER; note = 2'-O-methylcytidine-3'-phosphate
  modified_base 7: mod_base = OTHER; note = cytidine-2'-phosphate
  modified_base 8: mod_base = OTHER; note = 2'-O-methylcytidine-3'-phosphate
  modified_base 9: mod_base = OTHER; note = 2'-O-methyladenosine-3'-phosphate
  modified_base 10: mod_base = OTHER; note = 2'-O-methyluridine-3'-phosphate
  modified_base 11: mod_base = OTHER; note = 2'-O-methyluridine-3'-phosphate
  modified_base 12: mod_base = OTHER; note = 2'-O-methylguanosine-3'-phosphate
  modified_base 13: mod_base = OTHER; note = 2'-O-methylguanosine-3'-phosphate
  modified_base 14: mod_base = OTHER; note = 2'-fluoroadenosine-3'-phosphate
  modified_base 15: mod_base = OTHER; note = 2'-O-methylcytidine-3'-phosphate
  modified_base 16: mod_base = OTHER; note = 2'-fluoroguanosine-3'-phosphate
  modified_base 17: mod_base = OTHER; note = 2'-O-methylcytidine-3'-phosphate
  modified_base 18: mod_base = OTHER; note = 2'-O-methylguanosine-3'-phosphate
  modified_base 19: mod_base = OTHER; note = 2'-O-methylcytidine-3'-phosphate
  modified_base 20: mod_base = OTHER; note = 2'-O-methylcytidine-3'-phosphate
  modified_base 21: mod_base = OTHER; note = 2'-O-methylcytidine-3'- phosphorothioate
  modified_base 22: mod_base = OTHER; note = 2'-O-methyluridine-3'-phosphorothioate
  modified_base 23: mod_base = OTHER; note = 2'-O-methylcytidine-3'-phosphate
  misc_feature 1..4: note = RNA
  misc_feature 5: note = DNA
  misc_feature 6..23: note = RNA
tatctcccattggacgcgccctc

SEQ ID NO: 1398 - DNA, 23 bp, synthetic construct
  source 1..23: mol_type = other DNA
  modified_base 1: mod_base = OTHER; note = Vinyl-phosphonate 2'-O-methyluridine-3'-phosphorothioate
  modified_base 2: mod_base = OTHER; note = 2'-fluoroadenosine-3'-phosphorothioate
  modified_base 3: mod_base = OTHER; note = 2'-O-methyladenosine-3'-phosphate
  modified_base 4: mod_base = OTHER; note = 2'-O-methyluridine-3'-phosphate
  modified_base 6: mod_base = OTHER; note = 2'-O-methyluridine-3'-phosphate
  modified_base 7: mod_base = OTHER; note = cytidine-2'-phosphate
  modified_base 8: mod_base = OTHER; note = 2'-O-methylcytidine-3'-phosphate
  modified_base 9: mod_base = OTHER; note = 2'-O-methylcytidine-3'-phosphate
  modified_base 10: mod_base = OTHER; note = 2'-O-methyladenosine-3'-phosphate
  modified_base 11: mod_base = OTHER; note = 2'-O-methyluridine-3'-phosphate
  modified_base 12: mod_base = OTHER; note = 2'-O-methyluridine-3'-phosphate
  modified_base 13: mod_base = OTHER; note = 2'-O-methylguanosine-3'-phosphate
  modified_base 14: mod_base = OTHER; note = 2'-fluoroguanosine-3'-phosphate
  modified_base 15: mod_base = OTHER; note = 2'-O-methyladenosine-3'-phosphate
  modified_base 16: mod_base = OTHER; note = 2'-fluorocytidine-3'-phosphate
  modified_base 17: mod_base = OTHER; note = 2'-O-methylguanosine-3'-phosphate
  modified_base 18: mod_base = OTHER; note = 2'-O-methylcytidine-3'-phosphate
  modified_base 19: mod_base = OTHER; note = 2'-O-methylguanosine-3'-phosphate
  modified_base 20: mod_base = OTHER; note = 2'-O-methylcytidine-3'-phosphate
  modified_base 21: mod_base = OTHER; note = 2'-O-methylcytidine-3'- phosphorothioate
  modified_base 22: mod_base = OTHER; note = 2'-O-methylcytidine-3'- phosphorothioate
  modified_base 23: mod_base = OTHER; note = 2'-O-methyluridine-3'-phosphate
  misc_feature 1..4: note = RNA
  misc_feature 5: note = DNA
  misc_feature 6..23: note = RNA
taatctcccattggacgcgccct

SEQ ID NO: 1399 - DNA, 23 bp, synthetic construct
  source 1..23: mol_type = other DNA
  modified_base 1: mod_base = OTHER; note = Vinyl-phosphonate 2'-O-methyluridine-3'-phosphorothioate
  modified_base 2: mod_base = OTHER; note = 2'-fluoroguanosine-3'-phosphorothioate
  modified_base 3: mod_base = OTHER; note = 2'-O-methyladenosine-3'-phosphate
  modified_base 4: mod_base = OTHER; note = 2'-O-methyladenosine-3'-phosphate
  modified_base 6: mod_base = OTHER; note = 2'-O-methyluridine-3'-phosphate
  modified_base 7: mod_base = OTHER; note = cytidine-2'-phosphate
  modified_base 8: mod_base = OTHER; note = 2'-O-methyluridine-3'-phosphate
  modified_base 9: mod_base = OTHER; note = 2'-O-methylcytidine-3'-phosphate
  modified_base 10: mod_base = OTHER; note = 2'-O-methylcytidine-3'-phosphate
  modified_base 11: mod_base = OTHER; note = 2'-O-methylcytidine-3'-phosphate
  modified_base 12: mod_base = OTHER; note = 2'-O-methyladenosine-3'-phosphate
  modified_base 13: mod_base = OTHER; note = 2'-O-methyluridine-3'-phosphate
  modified_base 14: mod_base = OTHER; note = 2'-fluorouridine-3'-phosphate
  modified_base 15: mod_base = OTHER; note = 2'-O-methylguanosine-3'-phosphate
  modified_base 16: mod_base = OTHER; note = 2'-fluoroguanosine-3'-phosphate
  modified_base 17: mod_base = OTHER; note = 2'-O-methyladenosine-3'-phosphate
  modified_base 18: mod_base = OTHER; note = 2'-O-methylcytidine-3'-phosphate
  modified_base 19: mod_base = OTHER; note = 2'-O-methylguanosine-3'-phosphate
  modified_base 20: mod_base = OTHER; note = 2'-O-methylcytidine-3'-phosphate
  modified_base 21: mod_base = OTHER; note = 2'-O-methylguanosine-3'- phosphorothioate
  modified_base 22: mod_base = OTHER; note = 2'-O-methylcytidine-3'- phosphorothioate
  modified_base 23: mod_base = OTHER; note = 2'-O-methylcytidine-3'-phosphate
  misc_feature 1..4: note = RNA
  misc_feature 5: note = DNA
  misc_feature 6..23: note = RNA
tgaaatctcccattggacgcgcc

SEQ ID NO: 1400 - DNA, 23 bp, synthetic construct
  source 1..23: mol_type = other DNA
  modified_base 1: mod_base = OTHER; note = Vinyl-phosphonate 2'-O-methyluridine-3'-phosphorothioate
  modified_base 2: mod_base = OTHER; note = 2'-fluoroadenosine-3'-phosphorothioate
  modified_base 3: mod_base = OTHER; note = 2'-O-methylguanosine-3'-phosphate
  modified_base 4: mod_base = OTHER; note = 2'-O-methylcytidine-3'-phosphate
  modified_base 6: mod_base = OTHER; note = 2'-O-methyluridine-3'-phosphate
  modified_base 7: mod_base = OTHER; note = cytidine-2'-phosphate
  modified_base 8: mod_base = OTHER; note = 2'-O-methyladenosine-3'-phosphate
  modified_base 9: mod_base = OTHER; note = 2'-O-methyladenosine-3'-phosphate
  modified_base 10: mod_base = OTHER; note = 2'-O-methyladenosine-3'-phosphate
  modified_base 11: mod_base = OTHER; note = 2'-O-methyluridine-3'-phosphate
  modified_base 12: mod_base = OTHER; note = 2'-O-methylcytidine-3'-phosphate
  modified_base 13: mod_base = OTHER; note = 2'-O-methyluridine-3'-phosphate
  modified_base 14: mod_base = OTHER; note = 2'-fluorocytidine-3'-phosphate
  modified_base 15: mod_base = OTHER; note = 2'-O-methyladenosine-3'-phosphate
  modified_base 16: mod_base = OTHER; note = 2'-fluoroguanosine-3'-phosphate
  modified_base 17: mod_base = OTHER; note = 2'-O-methylguanosine-3'-phosphate
  modified_base 18: mod_base = OTHER; note = 2'-O-methylcytidine-3'-phosphate
  modified_base 19: mod_base = OTHER; note = 2'-O-methyluridine-3'-phosphate
  modified_base 20: mod_base = OTHER; note = 2'-O-methylguanosine-3'-phosphate
  modified_base 21: mod_base = OTHER; note = 2'-O-methyluridine-3'-phosphorothioate
  modified_base 22: mod_base = OTHER; note = 2'-O-methyluridine-3'-phosphorothioate
  modified_base 23: mod_base = OTHER; note = 2'-O-methyluridine-3'-phosphate
  misc_feature 1..4: note = RNA
  misc_feature 5: note = DNA
  misc_feature 6..23: note = RNA
tagcctcaaatctcaggctgttt

SEQ ID NO: 1401 - DNA, 23 bp, synthetic construct
  source 1..23: mol_type = other DNA
  modified_base 1: mod_base = OTHER; note = Vinyl-phosphonate 2'-O-methyluridine-3'-phosphorothioate
  modified_base 2: mod_base = OTHER; note = 2'-fluoroadenosine-3'-phosphorothioate
  modified_base 3: mod_base = OTHER; note = 2'-O-methylguanosine-3'-phosphate
  modified_base 4: mod_base = OTHER; note = 2'-O-methyladenosine-3'-phosphate
  modified_base 6: mod_base = OTHER; note = 2'-O-methylcytidine-3'-phosphate
  modified_base 7: mod_base = OTHER; note = cytidine-2'-phosphate
  modified_base 8: mod_base = OTHER; note = 2'-O-methyluridine-3'-phosphate
  modified_base 9: mod_base = OTHER; note = 2'-O-methylcytidine-3'-phosphate
  modified_base 10: mod_base = OTHER; note = 2'-O-methyladenosine-3'-phosphate
  modified_base 11: mod_base = OTHER; note = 2'-O-methyladenosine-3'-phosphate
  modified_base 12: mod_base = OTHER; note = 2'-O-methyladenosine-3'-phosphate
  modified_base 13: mod_base = OTHER; note = 2'-O-methyluridine-3'-phosphate
  modified_base 14: mod_base = OTHER; note = 2'-fluorocytidine-3'-phosphate
  modified_base 15: mod_base = OTHER; note = 2'-O-methyluridine-3'-phosphate
  modified_base 16: mod_base = OTHER; note = 2'-fluorocytidine-3'-phosphate
  modified_base 17: mod_base = OTHER; note = 2'-O-methyladenosine-3'-phosphate
  modified_base 18: mod_base = OTHER; note = 2'-O-methylguanosine-3'-phosphate
  modified_base 19: mod_base = OTHER; note = 2'-O-methylguanosine-3'-phosphate
  modified_base 20: mod_base = OTHER; note = 2'-O-methylcytidine-3'-phosphate
  modified_base 21: mod_base = OTHER; note = 2'-O-methyluridine-3'-phosphorothioate
  modified_base 22: mod_base = OTHER; note = 2'-O-methylguanosine-3'- phosphorothioate
  modified_base 23: mod_base = OTHER; note = 2'-O-methyluridine-3'-phosphate
  misc_feature 1..4: note = RNA
  misc_feature 5: note = DNA
  misc_feature 6..23: note = RNA
tagagcctcaaatctcaggctgt

SEQ ID NO: 1402 - DNA, 23 bp, synthetic construct
  source 1..23: mol_type = other DNA
  modified_base 1: mod_base = OTHER; note = Vinyl-phosphonate 2'-O-methyluridine-3'-phosphorothioate
  modified_base 2: mod_base = OTHER; note = 2'-fluoroadenosine-3'-phosphorothioate
  modified_base 3: mod_base = OTHER; note = 2'-O-methyladenosine-3'-phosphate
  modified_base 4: mod_base = OTHER; note = 2'-O-methylguanosine-3'-phosphate
  modified_base 6: mod_base = OTHER; note = 2'-O-methylguanosine-3'-phosphate
  modified_base 7: mod_base = OTHER; note = cytidine-2'-phosphate
  modified_base 8: mod_base = OTHER; note = 2'-O-methylcytidine-3'-phosphate
  modified_base 9: mod_base = OTHER; note = 2'-O-methyluridine-3'-phosphate
  modified_base 10: mod_base = OTHER; note = 2'-O-methylcytidine-3'-phosphate
  modified_base 11: mod_base = OTHER; note = 2'-O-methyladenosine-3'-phosphate
  modified_base 12: mod_base = OTHER; note = 2'-O-methyladenosine-3'-phosphate
  modified_base 13: mod_base = OTHER; note = 2'-O-methyladenosine-3'-phosphate
  modified_base 14: mod_base = OTHER; note = 2'-fluorouridine-3'-phosphate
  modified_base 15: mod_base = OTHER; note = 2'-O-methylcytidine-3'-phosphate
  modified_base 16: mod_base = OTHER; note = 2'-fluorouridine-3'-phosphate
  modified_base 17: mod_base = OTHER; note = 2'-O-methylcytidine-3'-phosphate
  modified_base 18: mod_base = OTHER; note = 2'-O-methyladenosine-3'-phosphate
  modified_base 19: mod_base = OTHER; note = 2'-O-methylguanosine-3'-phosphate
  modified_base 20: mod_base = OTHER; note = 2'-O-methylguanosine-3'-phosphate
  modified_base 21: mod_base = OTHER; note = 2'-O-methylcytidine-3'- phosphorothioate
  modified_base 22: mod_base = OTHER; note = 2'-O-methyluridine-3'-phosphorothioate
  modified_base 23: mod_base = OTHER; note = 2'-O-methylguanosine-3'-phosphate
  misc_feature 1..4: note = RNA
  misc_feature 5: note = DNA
  misc_feature 6..23: note = RNA
taagagcctcaaatctcaggctg

SEQ ID NO: 1403 - DNA, 23 bp, synthetic construct
  source 1..23: mol_type = other DNA
  modified_base 1: mod_base = OTHER; note = Vinyl-phosphonate 2'-O-methyluridine-3'-phosphorothioate
  modified_base 2: mod_base = OTHER; note = 2'-fluoroguanosine-3'-phosphorothioate
  modified_base 3: mod_base = OTHER; note = 2'-O-methyladenosine-3'-phosphate
  modified_base 4: mod_base = OTHER; note = 2'-O-methyladenosine-3'-phosphate
  modified_base 6: mod_base = OTHER; note = 2'-O-methyladenosine-3'-phosphate
  modified_base 7: mod_base = OTHER; note = guanosine-2'-phosphate
  modified_base 8: mod_base = OTHER; note = 2'-O-methylcytidine-3'-phosphate
  modified_base 9: mod_base = OTHER; note = 2'-O-methylcytidine-3'-phosphate
  modified_base 10: mod_base = OTHER; note = 2'-O-methyluridine-3'-phosphate
  modified_base 11: mod_base = OTHER; note = 2'-O-methylcytidine-3'-phosphate
  modified_base 12: mod_base = OTHER; note = 2'-O-methyladenosine-3'-phosphate
  modified_base 13: mod_base = OTHER; note = 2'-O-methyladenosine-3'-phosphate
  modified_base 14: mod_base = OTHER; note = 2'-fluoroadenosine-3'-phosphate
  modified_base 15: mod_base = OTHER; note = 2'-O-methyluridine-3'-phosphate
  modified_base 16: mod_base = OTHER; note = 2'-fluorocytidine-3'-phosphate
  modified_base 17: mod_base = OTHER; note = 2'-O-methyluridine-3'-phosphate
  modified_base 18: mod_base = OTHER; note = 2'-O-methylcytidine-3'-phosphate
  modified_base 19: mod_base = OTHER; note = 2'-O-methyladenosine-3'-phosphate
  modified_base 20: mod_base = OTHER; note = 2'-O-methylguanosine-3'-phosphate
  modified_base 21: mod_base = OTHER; note = 2'-O-methylguanosine-3'- phosphorothioate
  modified_base 22: mod_base = OTHER; note = 2'-O-methylcytidine-3'- phosphorothioate
  modified_base 23: mod_base = OTHER; note = 2'-O-methyluridine-3'-phosphate
  misc_feature 1..4: note = RNA
  misc_feature 5: note = DNA
  misc_feature 6..23: note = RNA
tgaagagcctcaaatctcaggct

SEQ ID NO: 1404 - DNA, 23 bp, synthetic construct
  source 1..23: mol_type = other DNA
  modified_base 1: mod_base = OTHER; note = Vinyl-phosphonate 2'-O-methyluridine-3'-phosphorothioate
  modified_base 2: mod_base = OTHER; note = 2'-fluoroadenosine-3'-phosphorothioate
  modified_base 3: mod_base = OTHER; note = 2'-O-methylguanosine-3'-phosphate
  modified_base 4: mod_base = OTHER; note = 2'-O-methylguanosine-3'-phosphate
  modified_base 6: mod_base = OTHER; note = 2'-O-methyladenosine-3'-phosphate
  modified_base 7: mod_base = OTHER; note = guanosine-2'-phosphate
  modified_base 8: mod_base = OTHER; note = 2'-O-methyladenosine-3'-phosphate
  modified_base 9: mod_base = OTHER; note = 2'-O-methylguanosine-3'-phosphate
  modified_base 10: mod_base = OTHER; note = 2'-O-methylcytidine-3'-phosphate
  modified_base 11: mod_base = OTHER; note = 2'-O-methylcytidine-3'-phosphate
  modified_base 12: mod_base = OTHER; note = 2'-O-methyluridine-3'-phosphate
  modified_base 13: mod_base = OTHER; note = 2'-O-methylcytidine-3'-phosphate
  modified_base 14: mod_base = OTHER; note = 2'-fluoroadenosine-3'-phosphate
  modified_base 15: mod_base = OTHER; note = 2'-O-methyladenosine-3'-phosphate
  modified_base 16: mod_base = OTHER; note = 2'-fluoroadenosine-3'-phosphate
  modified_base 17: mod_base = OTHER; note = 2'-O-methyluridine-3'-phosphate
  modified_base 18: mod_base = OTHER; note = 2'-O-methylcytidine-3'-phosphate
  modified_base 19: mod_base = OTHER; note = 2'-O-methyluridine-3'-phosphate
  modified_base 20: mod_base = OTHER; note = 2'-O-methylcytidine-3'-phosphate
  modified_base 21: mod_base = OTHER; note = 2'-O-methyladenosine-3'- phosphorothioate
  modified_base 22: mod_base = OTHER; note = 2'-O-methylguanosine-3'- phosphorothioate
  modified_base 23: mod_base = OTHER; note = 2'-O-methylguanosine-3'-phosphate
  misc_feature 1..4: note = RNA
  misc_feature 5: note = DNA
  misc_feature 6..23: note = RNA
taggaagagcctcaaatctcagg

SEQ ID NO: 1405 - DNA, 23 bp, synthetic construct
  source 1..23: mol_type = other DNA
  modified_base 1: mod_base = OTHER; note = Vinyl-phosphonate 2'-O-methyluridine-3'-phosphorothioate
  modified_base 2: mod_base = OTHER; note = 2'-fluorouridine -3'-phosphorothioate
  modified_base 3: mod_base = OTHER; note = 2'-O-methylguanosine-3'-phosphate
  modified_base 4: mod_base = OTHER; note = 2'-O-methyluridine-3'-phosphate
  modified_base 6: mod_base = OTHER; note = 2'-O-methylguanosine-3'-phosphate
  modified_base 7: mod_base = OTHER; note = guanosine-2'-phosphate
  modified_base 8: mod_base = OTHER; note = 2'-O-methyladenosine-3'-phosphate
  modified_base 9: mod_base = OTHER; note = 2'-O-methyladenosine-3'-phosphate
  modified_base 10: mod_base = OTHER; note = 2'-O-methylguanosine-3'-phosphate
  modified_base 11: mod_base = OTHER; note = 2'-O-methyladenosine-3'-phosphate
  modified_base 12: mod_base = OTHER; note = 2'-O-methylguanosine-3'-phosphate
  modified_base 13: mod_base = OTHER; note = 2'-O-methylcytidine-3'-phosphate
  modified_base 14: mod_base = OTHER; note = 2'-fluorocytidine-3'-phosphate
  modified_base 15: mod_base = OTHER; note = 2'-O-methyluridine-3'-phosphate
  modified_base 16: mod_base = OTHER; note = 2'-fluorocytidine-3'-phosphate
  modified_base 17: mod_base = OTHER; note = 2'-O-methyladenosine-3'-phosphate
  modified_base 18: mod_base = OTHER; note = 2'-O-methyladenosine-3'-phosphate
  modified_base 19: mod_base = OTHER; note = 2'-O-methyladenosine-3'-phosphate
  modified_base 20: mod_base = OTHER; note = 2'-O-methyluridine-3'-phosphate
  modified_base 21: mod_base = OTHER; note = 2'-O-methylcytidine-3'- phosphorothioate
  modified_base 22: mod_base = OTHER; note = 2'-O-methyluridine-3'-phosphorothioate
  modified_base 23: mod_base = OTHER; note = 2'-O-methylcytidine-3'-phosphate
  misc_feature 1..4: note = RNA
  misc_feature 5: note = DNA
  misc_feature 6..23: note = RNA
ttgtaggaagagcctcaaatctc

SEQ ID NO: 1406 - DNA, 23 bp, synthetic construct
  source 1..23: mol_type = other DNA
  modified_base 1: mod_base = OTHER; note = Vinyl-phosphonate 2'-O-methyluridine-3'-phosphorothioate
  modified_base 2: mod_base = OTHER; note = 2'-fluoroadenosine-3'-phosphorothioate
  modified_base 3: mod_base = OTHER; note = 2'-O-methyluridine-3'-phosphate
  modified_base 4: mod_base = OTHER; note = 2'-O-methylguanosine-3'-phosphate
  modified_base 6: mod_base = OTHER; note = 2'-O-methyladenosine-3'-phosphate
  modified_base 7: mod_base = OTHER; note = guanosine-2'-phosphate
  modified_base 8: mod_base = OTHER; note = 2'-O-methylguanosine-3'-phosphate
  modified_base 9: mod_base = OTHER; note = 2'-O-methyladenosine-3'-phosphate
  modified_base 10: mod_base = OTHER; note = 2'-O-methyladenosine-3'-phosphate
  modified_base 11: mod_base = OTHER; note = 2'-O-methylguanosine-3'-phosphate
  modified_base 12: mod_base = OTHER; note = 2'-O-methyladenosine-3'-phosphate
  modified_base 13: mod_base = OTHER; note = 2'-O-methylguanosine-3'-phosphate
  modified_base 14: mod_base = OTHER; note = 2'-fluorocytidine-3'-phosphate
  modified_base 15: mod_base = OTHER; note = 2'-O-methylcytidine-3'-phosphate
  modified_base 16: mod_base = OTHER; note = 2'-fluorouridine-3'-phosphate
  modified_base 17: mod_base = OTHER; note = 2'-O-methylcytidine-3'-phosphate
  modified_base 18: mod_base = OTHER; note = 2'-O-methyladenosine-3'-phosphate
  modified_base 19: mod_base = OTHER; note = 2'-O-methyladenosine-3'-phosphate
  modified_base 20: mod_base = OTHER; note = 2'-O-methyladenosine-3'-phosphate
  modified_base 21: mod_base = OTHER; note = 2'-O-methyluridine-3'-phosphorothioate
  modified_base 22: mod_base = OTHER; note = 2'-O-methylcytidine-3'- phosphorothioate
  modified_base 23: mod_base = OTHER; note = 2'-O-methyluridine-3'-phosphate
  misc_feature 1..4: note = RNA
  misc_feature 5: note = DNA
  misc_feature 6..23: note = RNA
tatgtaggaagagcctcaaatct

SEQ ID NO: 1407 - DNA, 23 bp, synthetic construct
  source 1..23: mol_type = other DNA
  modified_base 1: mod_base = OTHER; note = Vinyl-phosphonate 2'-O-methyluridine-3'-phosphorothioate
  modified_base 2: mod_base = OTHER; note = 2'-fluoroadenosine-3'-phosphorothioate
  modified_base 3: mod_base = OTHER; note = 2'-O-methylcytidine-3'-phosphate
  modified_base 4: mod_base = OTHER; note = 2'-O-methyladenosine-3'-phosphate
  modified_base 6: mod_base = OTHER; note = 2'-O-methyluridine-3'-phosphate
  modified_base 7: mod_base = OTHER; note = guanosine-2'-phosphate
  modified_base 8: mod_base = OTHER; note = 2'-O-methyluridine-3'-phosphate
  modified_base 9: mod_base = OTHER; note = 2'-O-methyladenosine-3'-phosphate
  modified_base 10: mod_base = OTHER; note = 2'-O-methylguanosine-3'-phosphate
  modified_base 11: mod_base = OTHER; note = 2'-O-methylguanosine-3'-phosphate
  modified_base 12: mod_base = OTHER; note = 2'-O-methyladenosine-3'-phosphate
  modified_base 13: mod_base = OTHER; note = 2'-O-methyladenosine-3'-phosphate
  modified_base 14: mod_base = OTHER; note = 2'-fluoroguanosine-3'-phosphate
  modified_base 15: mod_base = OTHER; note = 2'-O-methyladenosine-3'-phosphate
  modified_base 16: mod_base = OTHER; note = 2'-fluoroguanosine-3'-phosphate
  modified_base 17: mod_base = OTHER; note = 2'-O-methylcytidine-3'-phosphate
  modified_base 18: mod_base = OTHER; note = 2'-O-methylcytidine-3'-phosphate
  modified_base 19: mod_base = OTHER; note = 2'-O-methyluridine-3'-phosphate
  modified_base 20: mod_base = OTHER; note = 2'-O-methylcytidine-3'-phosphate
  modified_base 21: mod_base = OTHER; note = 2'-O-methyladenosine-3'- phosphorothioate
  modified_base 22: mod_base = OTHER; note = 2'-O-methyladenosine-3'- phosphorothioate
  modified_base 23: mod_base = OTHER; note = 2'-O-methyladenosine-3'-phosphate
  misc_feature 1..4: note = RNA
  misc_feature 5: note = DNA
  misc_feature 6..23: note = RNA
tacaatgtaggaagagcctcaaa

SEQ ID NO: 1408 - DNA, 23 bp, synthetic construct
  source 1..23: mol_type = other DNA
  modified_base 1: mod_base = OTHER; note = Vinyl-phosphonate 2'-O-methyluridine-3'-phosphorothioate
  modified_base 2: mod_base = OTHER; note = 2'-fluorocytidine-3'-phosphorothioate
  modified_base 3: mod_base = OTHER; note = 2'-O-methylcytidine-3'-phosphate
  modified_base 4: mod_base = OTHER; note = 2'-O-methyluridine-3'-phosphate
  modified_base 6: mod_base = OTHER; note = 2'-O-methyladenosine-3'-phosphate
  modified_base 7: mod_base = OTHER; note = cytidine-2'-phosphate
  modified_base 8: mod_base = OTHER; note = 2'-O-methyladenosine-3'-phosphate
  modified_base 9: mod_base = OTHER; note = 2'-O-methyladenosine-3'-phosphate
  modified_base 10: mod_base = OTHER; note = 2'-O-methyluridine-3'-phosphate
  modified_base 11: mod_base = OTHER; note = 2'-O-methylguanosine-3'-phosphate
  modified_base 12: mod_base = OTHER; note = 2'-O-methyluridine-3'-phosphate
  modified_base 13: mod_base = OTHER; note = 2'-O-methyladenosine-3'-phosphate
  modified_base 14: mod_base = OTHER; note = 2'-fluoroguanosine-3'-phosphate
  modified_base 15: mod_base = OTHER; note = 2'-O-methylguanosine-3'-phosphate
  modified_base 16: mod_base = OTHER; note = 2'-fluoroadenosine-3'-phosphate
  modified_base 17: mod_base = OTHER; note = 2'-O-methyladenosine-3'-phosphate
  modified_base 18: mod_base = OTHER; note = 2'-O-methylguanosine-3'-phosphate
  modified_base 19: mod_base = OTHER; note = 2'-O-methyladenosine-3'-phosphate
  modified_base 20: mod_base = OTHER; note = 2'-O-methylguanosine-3'-phosphate
  modified_base 21: mod_base = OTHER; note = 2'-O-methylcytidine-3'- phosphorothioate
  modified_base 22: mod_base = OTHER; note = 2'-O-methylcytidine-3'- phosphorothioate
  modified_base 23: mod_base = OTHER; note = 2'-O-methyluridine-3'-phosphate
  misc_feature 1..4: note = RNA
  misc_feature 5: note = DNA
  misc_feature 6..23: note = RNA
tcctgacaatgtaggaagagcct

SEQ ID NO: 1409 - DNA, 23 bp, synthetic construct
  source 1..23: mol_type = other DNA
  modified_base 1: mod_base = OTHER; note = Vinyl-phosphonate 2'-O-methyluridine-3'-phosphorothioate
  modified_base 2: mod_base = OTHER; note = 2'-fluoroguanosine-3'-phosphorothioate
  modified_base 3: mod_base = OTHER; note = 2'-O-methyluridine-3'-phosphate
  modified_base 4: mod_base = OTHER; note = 2'-O-methylcytidine-3'-phosphate
  modified_base 6: mod_base = OTHER; note = 2'-O-methyluridine-3'-phosphate
  modified_base 7: mod_base = OTHER; note = guanosine-2'-phosphate
  modified_base 8: mod_base = OTHER; note = 2'-O-methyladenosine-3'-phosphate
  modified_base 9: mod_base = OTHER; note = 2'-O-methylcytidine-3'-phosphate
  modified_base 10: mod_base = OTHER; note = 2'-O-methyladenosine-3'-phosphate
  modified_base 11: mod_base = OTHER; note = 2'-O-methyladenosine-3'-phosphate
  modified_base 12: mod_base = OTHER; note = 2'-O-methyluridine-3'-phosphate
  modified_base 13: mod_base = OTHER; note = 2'-O-methylguanosine-3'-phosphate
  modified_base 14: mod_base = OTHER; note = 2'-fluorouridine-3'-phosphate
  modified_base 15: mod_base = OTHER; note = 2'-O-methyladenosine-3'-phosphate
  modified_base 16: mod_base = OTHER; note = 2'-fluoroguanosine-3'-phosphate
  modified_base 17: mod_base = OTHER; note = 2'-O-methylguanosine-3'-phosphate
  modified_base 18: mod_base = OTHER; note = 2'-O-methyladenosine-3'-phosphate
  modified_base 19: mod_base = OTHER; note = 2'-O-methyladenosine-3'-phosphate
  modified_base 20: mod_base = OTHER; note = 2'-O-methylguanosine-3'-phosphate
  modified_base 21: mod_base = OTHER; note = 2'-O-methyladenosine-3'- phosphorothioate
  modified_base 22: mod_base = OTHER; note = 2'-O-methylguanosine-3'- phosphorothioate
  modified_base 23: mod_base = OTHER; note = 2'-O-methylcytidine-3'-phosphate
  misc_feature 1..4: note = RNA
  misc_feature 5: note = DNA
  misc_feature 6..23: note = RNA
tgtcctgacaatgtaggaagagc

SEQ ID NO: 1410 - DNA, 23 bp, synthetic construct
  source 1..23: mol_type = other DNA
  modified_base 1: mod_base = OTHER; note = Vinyl-phosphonate 2'-O-methyluridine-3'-phosphorothioate
  modified_base 2: mod_base = OTHER; note = 2'-fluoroadenosine-3'-phosphorothioate
  modified_base 3: mod_base = OTHER; note = 2'-O-methyluridine-3'-phosphate
  modified_base 4: mod_base = OTHER; note = 2'-O-methylguanosine-3'-phosphate
  modified_base 6: mod_base = OTHER; note = 2'-O-methylcytidine-3'-phosphate
  modified_base 7: mod_base = OTHER; note = cytidine-2'-phosphate
  modified_base 8: mod_base = OTHER; note = 2'-O-methyluridine-3'-phosphate
  modified_base 9: mod_base = OTHER; note = 2'-O-methylguanosine-3'-phosphate
  modified_base 10: mod_base = OTHER; note = 2'-O-methyladenosine-3'-phosphate
  modified_base 11: mod_base = OTHER; note = 2'-O-methylcytidine-3'-phosphate
  modified_base 12: mod_base = OTHER; note = 2'-O-methyladenosine-3'-phosphate
  modified_base 13: mod_base = OTHER; note = 2'-O-methyladenosine-3'-phosphate
  modified_base 14: mod_base = OTHER; note = 2'-fluorouridine-3'-phosphate
  modified_base 15: mod_base = OTHER; note = 2'-O-methylguanosine-3'-phosphate
  modified_base 16: mod_base = OTHER; note = 2'-fluorouridine-3'-phosphate
  modified_base 17: mod_base = OTHER; note = 2'-O-methyladenosine-3'-phosphate
  modified_base 18: mod_base = OTHER; note = 2'-O-methylguanosine-3'-phosphate
  modified_base 19: mod_base = OTHER; note = 2'-O-methylguanosine-3'-phosphate
  modified_base 20: mod_base = OTHER; note = 2'-O-methyladenosine-3'-phosphate
  modified_base 21: mod_base = OTHER; note = 2'-O-methyladenosine-3'- phosphorothioate
  modified_base 22: mod_base = OTHER; note = 2'-O-methylguanosine-3'- phosphorothioate
  modified_base 23: mod_base = OTHER; note = 2'-O-methyladenosine-3'-phosphate
  misc_feature 1..4: note = RNA
  misc_feature 5: note = DNA
  misc_feature 6..23: note = RNA
tatgtcctgacaatgtaggaaga

SEQ ID NO: 1411 - DNA, 23 bp, synthetic construct
  source 1..23: mol_type = other DNA
  modified_base 1: mod_base = OTHER; note = Vinyl-phosphonate 2'-O-methyluridine-3'-phosphorothioate
  modified_base 2: mod_base = OTHER; note = 2'-fluoroadenosine-3'-phosphorothioate
  modified_base 3: mod_base = OTHER; note = 2'-O-methyladenosine-3'-phosphate
  modified_base 4: mod_base = OTHER; note = 2'-O-methyluridine-3'-phosphate
  modified_base 6: mod_base = OTHER; note = 2'-O-methyluridine-3'-phosphate
  modified_base 7: mod_base = OTHER; note = cytidine-2'-phosphate
  modified_base 8: mod_base = OTHER; note = 2'-O-methylcytidine-3'-phosphate
  modified_base 9: mod_base = OTHER; note = 2'-O-methyluridine-3'-phosphate
  modified_base 10: mod_base = OTHER; note = 2'-O-methylguanosine-3'-phosphate
  modified_base 11: mod_base = OTHER; note = 2'-O-methyladenosine-3'-phosphate
  modified_base 12: mod_base = OTHER; note = 2'-O-methylcytidine-3'-phosphate
  modified_base 13: mod_base = OTHER; note = 2'-O-methyladenosine-3'-phosphate
  modified_base 14: mod_base = OTHER; note = 2'-fluoroadenosine-3'-phosphate
  modified_base 15: mod_base = OTHER; note = 2'-O-methyluridine-3'-phosphate
  modified_base 16: mod_base = OTHER; note = 2'-fluoroguanosine-3'-phosphate
  modified_base 17: mod_base = OTHER; note = 2'-O-methyluridine-3'-phosphate
  modified_base 18: mod_base = OTHER; note = 2'-O-methyladenosine-3'-phosphate
  modified_base 19: mod_base = OTHER; note = 2'-O-methylguanosine-3'-phosphate
  modified_base 20: mod_base = OTHER; note = 2'-O-methylguanosine-3'-phosphate
  modified_base 21: mod_base = OTHER; note = 2'-O-methyladenosine-3'- phosphorothioate
  modified_base 22: mod_base = OTHER; note = 2'-O-methyladenosine-3'- phosphorothioate
  modified_base 23: mod_base = OTHER; note = 2'-O-methylguanosine-3'-phosphate
  misc_feature 1..4: note = RNA
  misc_feature 5: note = DNA
  misc_feature 6..23: note = RNA
taatgtcctgacaatgtaggaag

SEQ ID NO: 1412 - DNA, 23 bp, synthetic construct
  source 1..23: mol_type = other DNA
  modified_base 1: mod_base = OTHER; note = Vinyl-phosphonate 2'-O-methyluridine-3'-phosphorothioate
  modified_base 2: mod_base = OTHER; note = 2'-fluoroguanosine-3'-phosphorothioate
  modified_base 3: mod_base = OTHER; note = 2'-O-methyladenosine-3'-phosphate
  modified_base 4: mod_base = OTHER; note = 2'-O-methyladenosine-3'-phosphate
  modified_base 6: mod_base = OTHER; note = 2'-O-methyluridine-3'-phosphate
  modified_base 7: mod_base = OTHER; note = guanosine-2'-phosphate
  modified_base 8: mod_base = OTHER; note = 2'-O-methyluridine-3'-phosphate
  modified_base 9: mod_base = OTHER; note = 2'-O-methylcytidine-3'-phosphate
  modified_base 10: mod_base = OTHER; note = 2'-O-methylcytidine-3'-phosphate
  modified_base 11: mod_base = OTHER; note = 2'-O-methyluridine-3'-phosphate
  modified_base 12: mod_base = OTHER; note = 2'-O-methylguanosine-3'-phosphate
  modified_base 13: mod_base = OTHER; note = 2'-O-methyladenosine-3'-phosphate
  modified_base 14: mod_base = OTHER; note = 2'-fluorocytidine-3'-phosphate
  modified_base 15: mod_base = OTHER; note = 2'-O-methyladenosine-3'-phosphate
  modified_base 16: mod_base = OTHER; note = 2'-fluoroadenosine-3'-phosphate
  modified_base 17: mod_base = OTHER; note = 2'-O-methyluridine-3'-phosphate
  modified_base 18: mod_base = OTHER; note = 2'-O-methylguanosine-3'-phosphate
  modified_base 19: mod_base = OTHER; note = 2'-O-methyluridine-3'-phosphate
  modified_base 20: mod_base = OTHER; note = 2'-O-methyladenosine-3'-phosphate
  modified_base 21: mod_base = OTHER; note = 2'-O-methylguanosine-3'- phosphorothioate
  modified_base 22: mod_base = OTHER; note = 2'-O-methylguanosine-3'- phosphorothioate
  modified_base 23: mod_base = OTHER; note = 2'-O-methyladenosine-3'-phosphate
  misc_feature 1..4: note = RNA
  misc_feature 5: note = DNA
  misc_feature 6..23: note = RNA
tgaaatgtcctgacaatgtagga

SEQ ID NO: 1413 - DNA, 23 bp, synthetic construct
  source 1..23: mol_type = other DNA
  modified_base 1: mod_base = OTHER; note = Vinyl-phosphonate 2'-O-methyluridine-3'-phosphorothioate
  modified_base 2: mod_base = OTHER; note = 2'-fluorouridine -3'-phosphorothioate
  modified_base 3: mod_base = OTHER; note = 2'-O-methyladenosine-3'-phosphate
  modified_base 4: mod_base = OTHER; note = 2'-O-methyladenosine-3'-phosphate
  modified_base 6: mod_base = OTHER; note = 2'-O-methyluridine-3'-phosphate
  modified_base 7: mod_base = OTHER; note = guanosine-2'-phosphate
  modified_base 8: mod_base = OTHER; note = 2'-O-methyladenosine-3'-phosphate
  modified_base 9: mod_base = OTHER; note = 2'-O-methyladenosine-3'-phosphate
  modified_base 10: mod_base = OTHER; note = 2'-O-methyladenosine-3'-phosphate
  modified_base 11: mod_base = OTHER; note = 2'-O-methyluridine-3'-phosphate
  modified_base 12: mod_base = OTHER; note = 2'-O-methylguanosine-3'-phosphate
  modified_base 13: mod_base = OTHER; note = 2'-O-methyluridine-3'-phosphate
  modified_base 14: mod_base = OTHER; note = 2'-fluorocytidine-3'-phosphate
  modified_base 15: mod_base = OTHER; note = 2'-O-methylcytidine-3'-phosphate
  modified_base 16: mod_base = OTHER; note = 2'-fluorouridine-3'-phosphate
  modified_base 17: mod_base = OTHER; note = 2'-O-methylguanosine-3'-phosphate
  modified_base 18: mod_base = OTHER; note = 2'-O-methyladenosine-3'-phosphate
  modified_base 19: mod_base = OTHER; note = 2'-O-methylcytidine-3'-phosphate
  modified_base 20: mod_base = OTHER; note = 2'-O-methyladenosine-3'-phosphate
  modified_base 21: mod_base = OTHER; note = 2'-O-methyladenosine-3'- phosphorothioate
  modified_base 22: mod_base = OTHER; note = 2'-O-methyluridine-3'-phosphorothioate
  modified_base 23: mod_base = OTHER; note = 2'-O-methylguanosine-3'-phosphate
  misc_feature 1..4: note = RNA
  misc_feature 5: note = DNA
  misc_feature 6..23: note = RNA
ttaaatgaaatgtcctgacaatg

SEQ ID NO: 1414 - DNA, 23 bp, synthetic construct
  source 1..23: mol_type = other DNA
  modified_base 1: mod_base = OTHER; note = Vinyl-phosphonate 2'-O-methyluridine-3'-phosphorothioate
  modified_base 2: mod_base = OTHER; note = 2'-fluoroadenosine-3'-phosphorothioate
  modified_base 3: mod_base = OTHER; note = 2'-O-methyluridine-3'-phosphate
  modified_base 4: mod_base = OTHER; note = 2'-O-methylguanosine-3'-phosphate
  modified_base 6: mod_base = OTHER; note = 2'-O-methyladenosine-3'-phosphate
  modified_base 7: mod_base = OTHER; note = cytidine-2'-phosphate
  modified_base 8: mod_base = OTHER; note = 2'-O-methyluridine-3'-phosphate
  modified_base 9: mod_base = OTHER; note = 2'-O-methyladenosine-3'-phosphate
  modified_base 10: mod_base = OTHER; note = 2'-O-methyladenosine-3'-phosphate
  modified_base 11: mod_base = OTHER; note = 2'-O-methyladenosine-3'-phosphate
  modified_base 12: mod_base = OTHER; note = 2'-O-methyluridine-3'-phosphate
  modified_base 13: mod_base = OTHER; note = 2'-O-methylguanosine-3'-phosphate
  modified_base 14: mod_base = OTHER; note = 2'-fluoroadenosine-3'-phosphate
  modified_base 15: mod_base = OTHER; note = 2'-O-methyladenosine-3'-phosphate
  modified_base 16: mod_base = OTHER; note = 2'-fluoroadenosine-3'-phosphate
  modified_base 17: mod_base = OTHER; note = 2'-O-methyluridine-3'-phosphate
  modified_base 18: mod_base = OTHER; note = 2'-O-methylguanosine-3'-phosphate
  modified_base 19: mod_base = OTHER; note = 2'-O-methyluridine-3'-phosphate
  modified_base 20: mod_base = OTHER; note = 2'-O-methylcytidine-3'-phosphate
  modified_base 21: mod_base = OTHER; note = 2'-O-methylcytidine-3'- phosphorothioate
  modified_base 22: mod_base = OTHER; note = 2'-O-methyluridine-3'-phosphorothioate
  modified_base 23: mod_base = OTHER; note = 2'-O-methylguanosine-3'-phosphate
  misc_feature 1..4: note = RNA
  misc_feature 5: note = DNA
  misc_feature 6..23: note = RNA
tatgaactaaatgaaatgtcctg

SEQ ID NO: 1415 - DNA, 23 bp, synthetic construct
  source 1..23: mol_type = other DNA
  modified_base 1: mod_base = OTHER; note = Vinyl-phosphonate 2'-O-methyluridine-3'-phosphorothioate
  modified_base 2: mod_base = OTHER; note = 2'-fluoroguanosine-3'-phosphorothioate
  modified_base 3: mod_base = OTHER; note = 2'-O-methyluridine-3'-phosphate
  modified_base 4: mod_base = OTHER; note = 2'-O-methylguanosine-3'-phosphate
  modified_base 6: mod_base = OTHER; note = 2'-O-methyluridine-3'-phosphate
  modified_base 7: mod_base = OTHER; note = cytidine-2'-phosphate
  modified_base 8: mod_base = OTHER; note = 2'-O-methyladenosine-3'-phosphate
  modified_base 9: mod_base = OTHER; note = 2'-O-methyluridine-3'-phosphate
  modified_base 10: mod_base = OTHER; note = 2'-O-methylguanosine-3'-phosphate
  modified_base 11: mod_base = OTHER; note = 2'-O-methyladenosine-3'-phosphate
  modified_base 12: mod_base = OTHER; note = 2'-O-methyladenosine-3'-phosphate
  modified_base 13: mod_base = OTHER; note = 2'-O-methylcytidine-3'-phosphate
  modified_base 14: mod_base = OTHER; note = 2'-fluorouridine-3'-phosphate
  modified_base 15: mod_base = OTHER; note = 2'-O-methyladenosine-3'-phosphate
  modified_base 16: mod_base = OTHER; note = 2'-fluoroadenosine-3'-phosphate
  modified_base 17: mod_base = OTHER; note = 2'-O-methyladenosine-3'-phosphate
  modified_base 18: mod_base = OTHER; note = 2'-O-methyluridine-3'-phosphate
  modified_base 19: mod_base = OTHER; note = 2'-O-methylguanosine-3'-phosphate
  modified_base 20: mod_base = OTHER; note = 2'-O-methyladenosine-3'-phosphate
  modified_base 21: mod_base = OTHER; note = 2'-O-methyladenosine-3'- phosphorothioate
  modified_base 22: mod_base = OTHER; note = 2'-O-methyladenosine-3'- phosphorothioate
  modified_base 23: mod_base = OTHER; note = 2'-O-methyluridine-3'-phosphate
  misc_feature 1..4: note = RNA
  misc_feature 5: note = DNA
  misc_feature 6..23: note = RNA
tgtgatcatgaactaaatgaaat

SEQ ID NO: 1416 - DNA, 23 bp, synthetic construct
  source 1..23: mol_type = other DNA
  modified_base 1: mod_base = OTHER; note = Vinyl-phosphonate 2'-O-methyluridine-3'-phosphorothioate
  modified_base 2: mod_base = OTHER; note = 2'-fluorouridine -3'-phosphorothioate
  modified_base 3: mod_base = OTHER; note = 2'-O-methyladenosine-3'-phosphate
  modified_base 4: mod_base = OTHER; note = 2'-O-methylcytidine-3'-phosphate
  modified_base 6: mod_base = OTHER; note = 2'-O-methyladenosine-3'-phosphate
  modified_base 7: mod_base = OTHER; note = cytidine-2'-phosphate
  modified_base 8: mod_base = OTHER; note = 2'-O-methylcytidine-3'-phosphate
  modified_base 9: mod_base = OTHER; note = 2'-O-methylguanosine-3'-phosphate
  modified_base 10: mod_base = OTHER; note = 2'-O-methyluridine-3'-phosphate
  modified_base 11: mod_base = OTHER; note = 2'-O-methylguanosine-3'-phosphate
  modified_base 12: mod_base = OTHER; note = 2'-O-methyladenosine-3'-phosphate
  modified_base 13: mod_base = OTHER; note = 2'-O-methyluridine-3'-phosphate
  modified_base 14: mod_base = OTHER; note = 2'-fluorocytidine-3'-phosphate
  modified_base 15: mod_base = OTHER; note = 2'-O-methyladenosine-3'-phosphate
  modified_base 16: mod_base = OTHER; note = 2'-fluorouridine-3'-phosphate
  modified_base 17: mod_base = OTHER; note = 2'-O-methylguanosine-3'-phosphate
  modified_base 18: mod_base = OTHER; note = 2'-O-methyladenosine-3'-phosphate
  modified_base 19: mod_base = OTHER; note = 2'-O-methyladenosine-3'-phosphate
  modified_base 20: mod_base = OTHER; note = 2'-O-methylcytidine-3'-phosphate
  modified_base 21: mod_base = OTHER; note = 2'-O-methyluridine-3'-phosphorothioate
  modified_base 22: mod_base = OTHER; note = 2'-O-methyladenosine-3'- phosphorothioate
  modified_base 23: mod_base = OTHER; note = 2'-O-methyladenosine-3'-phosphate
  misc_feature 1..4: note = RNA
  misc_feature 5: note = DNA
  misc_feature 6..23: note = RNA
ttaccaccgtgatcatgaactaa

SEQ ID NO: 1417 - DNA, 23 bp, synthetic construct
  source 1..23: mol_type = other DNA
  modified_base 1: mod_base = OTHER; note = Vinyl-phosphonate 2'-O-methyluridine-3'-phosphorothioate
  modified_base 2: mod_base = OTHER; note = 2'-fluoroadenosine-3'-phosphorothioate
  modified_base 3: mod_base = OTHER; note = 2'-O-methylcytidine-3'-phosphate
  modified_base 4: mod_base = OTHER; note = 2'-O-methyluridine-3'-phosphate
  modified_base 6: mod_base = OTHER; note = 2'-O-methylcytidine-3'-phosphate
  modified_base 7: mod_base = OTHER; note = cytidine-2'-phosphate
  modified_base 8: mod_base = OTHER; note = 2'-O-methyladenosine-3'-phosphate
  modified_base 9: mod_base = OTHER; note = 2'-O-methylcytidine-3'-phosphate
  modified_base 10: mod_base = OTHER; note = 2'-O-methylcytidine-3'-phosphate
  modified_base 11: mod_base = OTHER; note = 2'-O-methylguanosine-3'-phosphate
  modified_base 12: mod_base = OTHER; note = 2'-O-methyluridine-3'-phosphate
  modified_base 13: mod_base = OTHER; note = 2'-O-methylguanosine-3'-phosphate
  modified_base 14: mod_base = OTHER; note = 2'-fluoroadenosine-3'-phosphate
  modified_base 15: mod_base = OTHER; note = 2'-O-methyluridine-3'-phosphate
  modified_base 16: mod_base = OTHER; note = 2'-fluorocytidine-3'-phosphate
  modified_base 17: mod_base = OTHER; note = 2'-O-methyladenosine-3'-phosphate
  modified_base 18: mod_base = OTHER; note = 2'-O-methyluridine-3'-phosphate
  modified_base 19: mod_base = OTHER; note = 2'-O-methylguanosine-3'-phosphate
  modified_base 20: mod_base = OTHER; note = 2'-O-methyladenosine-3'-phosphate
  modified_base 21: mod_base = OTHER; note = 2'-O-methyladenosine-3'- phosphorothioate
  modified_base 22: mod_base = OTHER; note = 2'-O-methylcytidine-3'- phosphorothioate
  modified_base 23: mod_base = OTHER; note = 2'-O-methyluridine-3'-phosphate
  misc_feature 1..4: note = RNA
  misc_feature 5: note = DNA
  misc_feature 6..23: note = RNA
tactaccaccgtgatcatgaact

SEQ ID NO: 1418 - DNA, 23 bp, synthetic construct
  source 1..23: mol_type = other DNA
  modified_base 1: mod_base = OTHER; note = Vinyl-phosphonate 2'-O-methyluridine-3'-phosphorothioate
  modified_base 2: mod_base = OTHER; note = 2'-fluorouridine -3'-phosphorothioate
  modified_base 3: mod_base = OTHER; note = 2'-O-methyladenosine-3'-phosphate
  modified_base 4: mod_base = OTHER; note = 2'-O-methylcytidine-3'-phosphate
  modified_base 6: mod_base = OTHER; note = 2'-O-methyladenosine-3'-phosphate
  modified_base 7: mod_base = OTHER; note = cytidine-2'-phosphate
  modified_base 8: mod_base = OTHER; note = 2'-O-methylcytidine-3'-phosphate
  modified_base 9: mod_base = OTHER; note = 2'-O-methyladenosine-3'-phosphate
  modified_base 10: mod_base = OTHER; note = 2'-O-methylcytidine-3'-phosphate
  modified_base 11: mod_base = OTHER; note = 2'-O-methylcytidine-3'-phosphate
  modified_base 12: mod_base = OTHER; note = 2'-O-methylguanosine-3'-phosphate
  modified_base 13: mod_base = OTHER; note = 2'-O-methyluridine-3'-phosphate
  modified_base 14: mod_base = OTHER; note = 2'-fluoroguanosine-3'-phosphate
  modified_base 15: mod_base = OTHER; note = 2'-O-methyladenosine-3'-phosphate
  modified_base 16: mod_base = OTHER; note = 2'-fluorouridine-3'-phosphate
  modified_base 17: mod_base = OTHER; note = 2'-O-methylcytidine-3'-phosphate
  modified_base 18: mod_base = OTHER; note = 2'-O-methyladenosine-3'-phosphate
  modified_base 19: mod_base = OTHER; note = 2'-O-methyluridine-3'-phosphate
  modified_base 20: mod_base = OTHER; note = 2'-O-methylguanosine-3'-phosphate
  modified_base 21: mod_base = OTHER; note = 2'-O-methyladenosine-3'- phosphorothioate
  modified_base 22: mod_base = OTHER; note = 2'-O-methyladenosine-3'- phosphorothioate
  modified_base 23: mod_base = OTHER; note = 2'-O-methylcytidine-3'-phosphate
  misc_feature 1..4: note = RNA
  misc_feature 5: note = DNA
  misc_feature 6..23: note = RNA
ttactaccaccgtgatcatgaac

SEQ ID NO: 1419 - DNA, 23 bp, synthetic construct
  source 1..23: mol_type = other DNA
  modified_base 1: mod_base = OTHER; note = Vinyl-phosphonate 2'-O-methyluridine-3'-phosphorothioate
  modified_base 2: mod_base = OTHER; note = 2'-fluorouridine -3'-phosphorothioate
  modified_base 3: mod_base = OTHER; note = 2'-O-methylguanosine-3'-phosphate
  modified_base 4: mod_base = OTHER; note = 2'-O-methyluridine-3'-phosphate
  modified_base 6: mod_base = OTHER; note = 2'-O-methyladenosine-3'-phosphate
  modified_base 7: mod_base = OTHER; note = cytidine-2'-phosphate
  modified_base 8: mod_base = OTHER; note = 2'-O-methyluridine-3'-phosphate
  modified_base 9: mod_base = OTHER; note = 2'-O-methyladenosine-3'-phosphate
  modified_base 10: mod_base = OTHER; note = 2'-O-methylcytidine-3'-phosphate
  modified_base 11: mod_base = OTHER; note = 2'-O-methylcytidine-3'-phosphate
  modified_base 12: mod_base = OTHER; note = 2'-O-methyladenosine-3'-phosphate
  modified_base 13: mod_base = OTHER; note = 2'-O-methylcytidine-3'-phosphate
  modified_base 14: mod_base = OTHER; note = 2'-fluorocytidine-3'-phosphate
  modified_base 15: mod_base = OTHER; note = 2'-O-methylguanosine-3'-phosphate
  modified_base 16: mod_base = OTHER; note = 2'-fluorouridine-3'-phosphate
  modified_base 17: mod_base = OTHER; note = 2'-O-methylguanosine-3'-phosphate
  modified_base 18: mod_base = OTHER; note = 2'-O-methyladenosine-3'-phosphate
  modified_base 19: mod_base = OTHER; note = 2'-O-methyluridine-3'-phosphate
  modified_base 20: mod_base = OTHER; note = 2'-O-methylcytidine-3'-phosphate
  modified_base 21: mod_base = OTHER; note = 2'-O-methyladenosine-3'- phosphorothioate
  modified_base 22: mod_base = OTHER; note = 2'-O-methyluridine-3'-phosphorothioate
  modified_base 23: mod_base = OTHER; note = 2'-O-methylguanosine-3'-phosphate
  misc_feature 1..4: note = RNA
  misc_feature 5: note = DNA
  misc_feature 6..23: note = RNA
ttgttactaccaccgtgatcatg

SEQ ID NO: 1420 - DNA, 23 bp, synthetic construct
  source 1..23: mol_type = other DNA
  modified_base 1: mod_base = OTHER; note = Vinyl-phosphonate 2'-O-methyluridine-3'-phosphorothioate
  modified_base 2: mod_base = OTHER; note = 2'-fluoroadenosine-3'-phosphorothioate
  modified_base 3: mod_base = OTHER; note = 2'-O-methyluridine-3'-phosphate
  modified_base 4: mod_base = OTHER; note = 2'-O-methylcytidine-3'-phosphate
  modified_base 6: mod_base = OTHER; note = 2'-O-methyluridine-3'-phosphate
  modified_base 7: mod_base = OTHER; note = guanosine-2'-phosphate
  modified_base 8: mod_base = OTHER; note = 2'-O-methyluridine-3'-phosphate
  modified_base 9: mod_base = OTHER; note = 2'-O-methyluridine-3'-phosphate
  modified_base 10: mod_base = OTHER; note = 2'-O-methyladenosine-3'-phosphate
  modified_base 11: mod_base = OTHER; note = 2'-O-methylcytidine-3'-phosphate
  modified_base 12: mod_base = OTHER; note = 2'-O-methyluridine-3'-phosphate
  modified_base 13: mod_base = OTHER; note = 2'-O-methyladenosine-3'-phosphate
  modified_base 14: mod_base = OTHER; note = 2'-fluorocytidine-3'-phosphate
  modified_base 15: mod_base = OTHER; note = 2'-O-methylcytidine-3'-phosphate
  modified_base 16: mod_base = OTHER; note = 2'-fluoroadenosine-3'-phosphate
  modified_base 17: mod_base = OTHER; note = 2'-O-methylcytidine-3'-phosphate
  modified_base 18: mod_base = OTHER; note = 2'-O-methylcytidine-3'-phosphate
  modified_base 19: mod_base = OTHER; note = 2'-O-methylguanosine-3'-phosphate
  modified_base 20: mod_base = OTHER; note = 2'-O-methyluridine-3'-phosphate
  modified_base 21: mod_base = OTHER; note = 2'-O-methylguanosine-3'- phosphorothioate
  modified_base 22: mod_base = OTHER; note = 2'-O-methyladenosine-3'- phosphorothioate
  modified_base 23: mod_base = OTHER; note = 2'-O-methyluridine-3'-phosphate
  misc_feature 1..4: note = RNA
  misc_feature 5: note = DNA
  misc_feature 6..23: note = RNA
tatcgtgttactaccaccgtgat

SEQ ID NO: 1421 - DNA, 23 bp, synthetic construct
  source 1..23: mol_type = other DNA
  modified_base 1: mod_base = OTHER; note = Vinyl-phosphonate 2'-O-methyluridine-3'-phosphorothioate
  modified_base 2: mod_base = OTHER; note = 2'-fluoroguanosine-3'-phosphorothioate
  modified_base 3: mod_base = OTHER; note = 2'-O-methyladenosine-3'-phosphate
  modified_base 4: mod_base = OTHER; note = 2'-O-methyluridine-3'-phosphate
  modified_base 6: mod_base = OTHER; note = 2'-O-methyluridine-3'-phosphate
  modified_base 7: mod_base = OTHER; note = cytidine-2'-phosphate
  modified_base 8: mod_base = OTHER; note = 2'-O-methyluridine-3'-phosphate
  modified_base 9: mod_base = OTHER; note = 2'-O-methyluridine-3'-phosphate
  modified_base 10: mod_base = OTHER; note = 2'-O-methyladenosine-3'-phosphate
  modified_base 11: mod_base = OTHER; note = 2'-O-methylguanosine-3'-phosphate
  modified_base 12: mod_base = OTHER; note = 2'-O-methylguanosine-3'-phosphate
  modified_base 13: mod_base = OTHER; note = 2'-O-methyluridine-3'-phosphate
  modified_base 14: mod_base = OTHER; note = 2'-fluoroguanosine-3'-phosphate
  modified_base 15: mod_base = OTHER; note = 2'-O-methylguanosine-3'-phosphate
  modified_base 16: mod_base = OTHER; note = 2'-fluorouridine-3'-phosphate
  modified_base 17: mod_base = OTHER; note = 2'-O-methylguanosine-3'-phosphate
  modified_base 18: mod_base = OTHER; note = 2'-O-methylcytidine-3'-phosphate
  modified_base 19: mod_base = OTHER; note = 2'-O-methyluridine-3'-phosphate
  modified_base 20: mod_base = OTHER; note = 2'-O-methyluridine-3'-phosphate
  modified_base 21: mod_base = OTHER; note = 2'-O-methyladenosine-3'- phosphorothioate
  modified_base 22: mod_base = OTHER; note = 2'-O-methyladenosine-3'- phosphorothioate
  modified_base 23: mod_base = OTHER; note = 2'-O-methyladenosine-3'-phosphate
  misc_feature 1..4: note = RNA
  misc_feature 5: note = DNA
  misc_feature 6..23: note = RNA
tgatctcttaggtggtgcttaaa

SEQ ID NO: 1422 - DNA, 23 bp, synthetic construct
  source 1..23: mol_type = other DNA
  modified_base 1: mod_base = OTHER; note = Vinyl-phosphonate 2'-O-methyluridine-3'-phosphorothioate
  modified_base 2: mod_base = OTHER; note = 2'-fluoroguanosine-3'-phosphorothioate
  modified_base 3: mod_base = OTHER; note = 2'-O-methyladenosine-3'-phosphate
  modified_base 4: mod_base = OTHER; note = 2'-O-methylguanosine-3'-phosphate
  modified_base 6: mod_base = OTHER; note = 2'-O-methyladenosine-3'-phosphate
  modified_base 7: mod_base = OTHER; note = guanosine-2'-phosphate
  modified_base 8: mod_base = OTHER; note = 2'-O-methyladenosine-3'-phosphate
  modified_base 9: mod_base = OTHER; note = 2'-O-methyluridine-3'-phosphate
  modified_base 10: mod_base = OTHER; note = 2'-O-methylcytidine-3'-phosphate
  modified_base 11: mod_base = OTHER; note = 2'-O-methyluridine-3'-phosphate
  modified_base 12: mod_base = OTHER; note = 2'-O-methylcytidine-3'-phosphate
  modified_base 13: mod_base = OTHER; note = 2'-O-methyluridine-3'-phosphate
  modified_base 14: mod_base = OTHER; note = 2'-fluorouridine-3'-phosphate
  modified_base 15: mod_base = OTHER; note = 2'-O-methyladenosine-3'-phosphate
  modified_base 16: mod_base = OTHER; note = 2'-fluoroguanosine-3'-phosphate
  modified_base 17: mod_base = OTHER; note = 2'-O-methylguanosine-3'-phosphate
  modified_base 18: mod_base = OTHER; note = 2'-O-methyluridine-3'-phosphate
  modified_base 19: mod_base = OTHER; note = 2'-O-methylguanosine-3'-phosphate
  modified_base 20: mod_base = OTHER; note = 2'-O-methylguanosine-3'-phosphate
  modified_base 21: mod_base = OTHER; note = 2'-O-methyluridine-3'-phosphorothioate
  modified_base 22: mod_base = OTHER; note = 2'-O-methylguanosine-3'- phosphorothioate
  modified_base 23: mod_base = OTHER; note = 2'-O-methylcytidine-3'-phosphate
  misc_feature 1..4: note = RNA
  misc_feature 5: note = DNA
  misc_feature 6..23: note = RNA
tgagcagatctcttaggtggtgc

SEQ ID NO: 1423 - DNA, 23 bp, synthetic construct
  source 1..23: mol_type = other DNA
  modified_base 1: mod_base = OTHER; note = Vinyl-phosphonate 2'-O-methyluridine-3'-phosphorothioate
  modified_base 2: mod_base = OTHER; note = 2'-fluoroadenosine-3'-phosphorothioate
  modified_base 3: mod_base = OTHER; note = 2'-O-methyluridine-3'-phosphate
  modified_base 4: mod_base = OTHER; note = 2'-O-methylguanosine-3'-phosphate
  modified_base 6: mod_base = OTHER; note = 2'-O-methylguanosine-3'-phosphate
  modified_base 7: mod_base = OTHER; note = cytidine-2'-phosphate
  modified_base 8: mod_base = OTHER; note = 2'-O-methyladenosine-3'-phosphate
  modified_base 9: mod_base = OTHER; note = 2'-O-methylguanosine-3'-phosphate
  modified_base 10: mod_base = OTHER; note = 2'-O-methyladenosine-3'-phosphate
  modified_base 11: mod_base = OTHER; note = 2'-O-methyluridine-3'-phosphate
  modified_base 12: mod_base = OTHER; note = 2'-O-methylcytidine-3'-phosphate
  modified_base 13: mod_base = OTHER; note = 2'-O-methyluridine-3'-phosphate
  modified_base 14: mod_base = OTHER; note = 2'-fluorocytidine-3'-phosphate
  modified_base 15: mod_base = OTHER; note = 2'-O-methyluridine-3'-phosphate
  modified_base 16: mod_base = OTHER; note = 2'-fluorouridine-3'-phosphate
  modified_base 17: mod_base = OTHER; note = 2'-O-methyladenosine-3'-phosphate
  modified_base 18: mod_base = OTHER; note = 2'-O-methylguanosine-3'-phosphate
  modified_base 19: mod_base = OTHER; note = 2'-O-methylguanosine-3'-phosphate
  modified_base 20: mod_base = OTHER; note = 2'-O-methyluridine-3'-phosphate
  modified_base 21: mod_base = OTHER; note = 2'-O-methylguanosine-3'- phosphorothioate
  modified_base 22: mod_base = OTHER; note = 2'-O-methylguanosine-3'- phosphorothioate
  modified_base 23: mod_base = OTHER; note = 2'-O-methyluridine-3'-phosphate
  misc_feature 1..4: note = RNA
  misc_feature 5: note = DNA
  misc_feature 6..23: note = RNA
tatgagcagatctcttaggtggt

SEQ ID NO: 1424 - DNA, 23 bp, synthetic construct
  source 1..23: mol_type = other DNA
  modified_base 1: mod_base = OTHER; note = Vinyl-phosphonate 2'-O-methyluridine-3'-phosphorothioate
  modified_base 2: mod_base = OTHER; note = 2'-fluoroguanosine-3'-phosphorothioate
  modified_base 3: mod_base = OTHER; note = 2'-O-methyladenosine-3'-phosphate
  modified_base 4: mod_base = OTHER; note = 2'-O-methyluridine-3'-phosphate
  modified_base 6: mod_base = OTHER; note = 2'-O-methyladenosine-3'-phosphate
  modified_base 7: mod_base = OTHER; note = guanosine-2'-phosphate
  modified_base 8: mod_base = OTHER; note = 2'-O-methylcytidine-3'-phosphate
  modified_base 9: mod_base = OTHER; note = 2'-O-methyladenosine-3'-phosphate
  modified_base 10: mod_base = OTHER; note = 2'-O-methylguanosine-3'-phosphate
  modified_base 11: mod_base = OTHER; note = 2'-O-methyladenosine-3'-phosphate
  modified_base 12: mod_base = OTHER; note = 2'-O-methyluridine-3'-phosphate
  modified_base 13: mod_base = OTHER; note = 2'-O-methylcytidine-3'-phosphate
  modified_base 14: mod_base = OTHER; note = 2'-fluorouridine-3'-phosphate
  modified_base 15: mod_base = OTHER; note = 2'-O-methylcytidine-3'-phosphate
  modified_base 16: mod_base = OTHER; note = 2'-fluorouridine-3'-phosphate
  modified_base 17: mod_base = OTHER; note = 2'-O-methyluridine-3'-phosphate
  modified_base 18: mod_base = OTHER; note = 2'-O-methyladenosine-3'-phosphate
  modified_base 19: mod_base = OTHER; note = 2'-O-methylguanosine-3'-phosphate
  modified_base 20: mod_base = OTHER; note = 2'-O-methylguanosine-3'-phosphate
  modified_base 21: mod_base = OTHER; note = 2'-O-methyluridine-3'-phosphorothioate
  modified_base 22: mod_base = OTHER; note = 2'-O-methylguanosine-3'- phosphorothioate
  modified_base 23: mod_base = OTHER; note = 2'-O-methylguanosine-3'-phosphate
  misc_feature 1..4: note = RNA
  misc_feature 5: note = DNA
  misc_feature 6..23: note = RNA
tgatgagcagatctcttaggtgg

SEQ ID NO: 1425 - DNA, 23 bp, synthetic construct
  source 1..23: mol_type = other DNA
  modified_base 1: mod_base = OTHER; note = Vinyl-phosphonate 2'-O-methyluridine-3'-phosphorothioate
  modified_base 2: mod_base = OTHER; note = 2'-fluorouridine -3'-phosphorothioate
  modified_base 3: mod_base = OTHER; note = 2'-O-methyladenosine-3'-phosphate
  modified_base 4: mod_base = OTHER; note = 2'-O-methylguanosine-3'-phosphate
  modified_base 6: mod_base = OTHER; note = 2'-O-methyluridine-3'-phosphate
  modified_base 7: mod_base = OTHER; note = guanosine-2'-phosphate
  modified_base 8: mod_base = OTHER; note = 2'-O-methyladenosine-3'-phosphate
  modified_base 9: mod_base = OTHER; note = 2'-O-methylguanosine-3'-phosphate
  modified_base 10: mod_base = OTHER; note = 2'-O-methylcytidine-3'-phosphate
  modified_base 11: mod_base = OTHER; note = 2'-O-methyladenosine-3'-phosphate
  modified_base 12: mod_base = OTHER; note = 2'-O-methylguanosine-3'-phosphate
  modified_base 13: mod_base = OTHER; note = 2'-O-methyladenosine-3'-phosphate
  modified_base 14: mod_base = OTHER; note = 2'-fluorouridine-3'-phosphate
  modified_base 15: mod_base = OTHER; note = 2'-O-methylcytidine-3'-phosphate
  modified_base 16: mod_base = OTHER; note = 2'-fluorouridine-3'-phosphate
  modified_base 17: mod_base = OTHER; note = 2'-O-methylcytidine-3'-phosphate
  modified_base 18: mod_base = OTHER; note = 2'-O-methyluridine-3'-phosphate
  modified_base 19: mod_base = OTHER; note = 2'-O-methyluridine-3'-phosphate
  modified_base 20: mod_base = OTHER; note = 2'-O-methyladenosine-3'-phosphate
  modified_base 21: mod_base = OTHER; note = 2'-O-methylguanosine-3'- phosphorothioate
  modified_base 22: mod_base = OTHER; note = 2'-O-methylguanosine-3'- phosphorothioate
  modified_base 23: mod_base = OTHER; note = 2'-O-methyluridine-3'-phosphate
  misc_feature 1..4: note = RNA
  misc_feature 5: note = DNA
  misc_feature 6..23: note = RNA
ttagatgagcagatctcttaggt

SEQ ID NO: 1426 - DNA, 23 bp, synthetic construct
  source 1..23: mol_type = other DNA
  modified_base 1: mod_base = OTHER; note = Vinyl-phosphonate 2'-O-methyluridine-3'-phosphorothioate
  modified_base 2: mod_base = OTHER; note = 2'-fluoroguanosine-3'-phosphorothioate
  modified_base 3: mod_base = OTHER; note = 2'-O-methylcytidine-3'-phosphate
  modified_base 4: mod_base = OTHER; note = 2'-O-methyluridine-3'-phosphate
  modified_base 6: mod_base = OTHER; note = 2'-O-methyladenosine-3'-phosphate
  modified_base 7: mod_base = OTHER; note = guanosine-2'-phosphate
  modified_base 8: mod_base = OTHER; note = 2'-O-methyladenosine-3'-phosphate
  modified_base 9: mod_base = OTHER; note = 2'-O-methyluridine-3'-phosphate
  modified_base 10: mod_base = OTHER; note = 2'-O-methylguanosine-3'-phosphate
  modified_base 11: mod_base = OTHER; note = 2'-O-methyladenosine-3'-phosphate
  modified_base 12: mod_base = OTHER; note = 2'-O-methylguanosine-3'-phosphate
  modified_base 13: mod_base = OTHER; note = 2'-O-methylcytidine-3'-phosphate
  modified_base 14: mod_base = OTHER; note = 2'-fluoroadenosine-3'-phosphate
  modified_base 15: mod_base = OTHER; note = 2'-O-methylguanosine-3'-phosphate
  modified_base 16: mod_base = OTHER; note = 2'-fluoroadenosine-3'-phosphate
  modified_base 17: mod_base = OTHER; note = 2'-O-methyluridine-3'-phosphate
  modified_base 18: mod_base = OTHER; note = 2'-O-methylcytidine-3'-phosphate
  modified_base 19: mod_base = OTHER; note = 2'-O-methyluridine-3'-phosphate
  modified_base 20: mod_base = OTHER; note = 2'-O-methylcytidine-3'-phosphate
  modified_base 21: mod_base = OTHER; note = 2'-O-methyluridine-3'-phosphorothioate
  modified_base 22: mod_base = OTHER; note = 2'-O-methyluridine-3'-phosphorothioate
  modified_base 23: mod_base = OTHER; note = 2'-O-methyladenosine-3'-phosphate
  misc_feature 1..4: note = RNA
  misc_feature 5: note = DNA
  misc_feature 6..23: note = RNA
tgcttagatgagcagatctctta

SEQ ID NO: 1427 - DNA, 23 bp, synthetic construct
  source 1..23: mol_type = other DNA
  modified_base 1: mod_base = OTHER; note = Vinyl-phosphonate 2'-O-methyluridine-3'-phosphorothioate
  modified_base 2: mod_base = OTHER; note = 2'-fluorouridine -3'-phosphorothioate
  modified_base 3: mod_base = OTHER; note = 2'-O-methyluridine-3'-phosphate
  modified_base 4: mod_base = OTHER; note = 2'-O-methyladenosine-3'-phosphate
  modified_base 6: mod_base = OTHER; note = 2'-O-methylguanosine-3'-phosphate
  modified_base 7: mod_base = OTHER; note = cytidine-2'-phosphate
  modified_base 8: mod_base = OTHER; note = 2'-O-methyluridine-3'-phosphate
  modified_base 9: mod_base = OTHER; note = 2'-O-methyluridine-3'-phosphate
  modified_base 10: mod_base = OTHER; note = 2'-O-methyladenosine-3'-phosphate
  modified_base 11: mod_base = OTHER; note = 2'-O-methylguanosine-3'-phosphate
  modified_base 12: mod_base = OTHER; note = 2'-O-methyladenosine-3'-phosphate
  modified_base 13: mod_base = OTHER; note = 2'-O-methyluridine-3'-phosphate
  modified_base 14: mod_base = OTHER; note = 2'-fluoroguanosine-3'-phosphate
  modified_base 15: mod_base = OTHER; note = 2'-O-methyladenosine-3'-phosphate
  modified_base 16: mod_base = OTHER; note = 2'-fluoroguanosine-3'-phosphate
  modified_base 17: mod_base = OTHER; note = 2'-O-methylcytidine-3'-phosphate
  modified_base 18: mod_base = OTHER; note = 2'-O-methyladenosine-3'-phosphate
  modified_base 19: mod_base = OTHER; note = 2'-O-methylguanosine-3'-phosphate
  modified_base 20: mod_base = OTHER; note = 2'-O-methyladenosine-3'-phosphate
  modified_base 21: mod_base = OTHER; note = 2'-O-methyluridine-3'-phosphorothioate
  modified_base 22: mod_base = OTHER; note = 2'-O-methylcytidine-3'- phosphorothioate
  modified_base 23: mod_base = OTHER; note = 2'-O-methyluridine-3'-phosphate
  misc_feature 1..4: note = RNA
  misc_feature 5: note = DNA
  misc_feature 6..23: note = RNA
tttaggcttagatgagcagatct

SEQ ID NO: 1428 - DNA, 23 bp, synthetic construct
  source 1..23: mol_type = other DNA
  modified_base 1: mod_base = OTHER; note = Vinyl-phosphonate 2'-O-methyluridine-3'-phosphorothioate
  modified_base 2: mod_base = OTHER; note = 2'-fluoroadenosine-3'-phosphorothioate
  modified_base 3: mod_base = OTHER; note = 2'-O-methylcytidine-3'-phosphate
  modified_base 4: mod_base = OTHER; note = 2'-O-methyluridine-3'-phosphate
  modified_base 6: mod_base = OTHER; note = 2'-O-methyladenosine-3'-phosphate
  modified_base 7: mod_base = OTHER; note = guanosine-2'-phosphate
  modified_base 8: mod_base = OTHER; note = 2'-O-methylguanosine-3'-phosphate
  modified_base 9: mod_base = OTHER; note = 2'-O-methylcytidine-3'-phosphate
  modified_base 10: mod_base = OTHER; note = 2'-O-methyluridine-3'-phosphate
  modified_base 11: mod_base = OTHER; note = 2'-O-methyluridine-3'-phosphate
  modified_base 12: mod_base = OTHER; note = 2'-O-methyladenosine-3'-phosphate
  modified_base 13: mod_base = OTHER; note = 2'-O-methylguanosine-3'-phosphate
  modified_base 14: mod_base = OTHER; note = 2'-fluoroadenosine-3'-phosphate
  modified_base 15: mod_base = OTHER; note = 2'-O-methyluridine-3'-phosphate
  modified_base 16: mod_base = OTHER; note = 2'-fluoroguanosine-3'-phosphate
  modified_base 17: mod_base = OTHER; note = 2'-O-methyladenosine-3'-phosphate
  modified_base 18: mod_base = OTHER; note = 2'-O-methylguanosine-3'-phosphate
  modified_base 19: mod_base = OTHER; note = 2'-O-methylcytidine-3'-phosphate
  modified_base 20: mod_base = OTHER; note = 2'-O-methyladenosine-3'-phosphate
  modified_base 21: mod_base = OTHER; note = 2'-O-methylguanosine-3'- phosphorothioate
  modified_base 22: mod_base = OTHER; note = 2'-O-methyladenosine-3'- phosphorothioate
  modified_base 23: mod_base = OTHER; note = 2'-O-methyluridine-3'-phosphate
  misc_feature 1..4: note = RNA
  misc_feature 5: note = DNA
  misc_feature 6..23: note = RNA
tacttaggcttagatgagcagat

SEQ ID NO: 1429 - DNA, 23 bp, synthetic construct
  source 1..23: mol_type = other DNA
  modified_base 1: mod_base = OTHER; note = Vinyl-phosphonate 2'-O-methyluridine-3'-phosphorothioate
  modified_base 2: mod_base = OTHER; note = 2'-fluorocytidine-3'-phosphorothioate
  modified_base 3: mod_base = OTHER; note = 2'-O-methyladenosine-3'-phosphate
  modified_base 4: mod_base = OTHER; note = 2'-O-methylguanosine-3'-phosphate
  modified_base 6: mod_base = OTHER; note = 2'-O-methylcytidine-3'-phosphate
  modified_base 7: mod_base = OTHER; note = cytidine-2'-phosphate
  modified_base 8: mod_base = OTHER; note = 2'-O-methyladenosine-3'-phosphate
  modified_base 9: mod_base = OTHER; note = 2'-O-methyladenosine-3'-phosphate
  modified_base 10: mod_base = OTHER; note = 2'-O-methylcytidine-3'-phosphate
  modified_base 11: mod_base = OTHER; note = 2'-O-methyluridine-3'-phosphate
  modified_base 12: mod_base = OTHER; note = 2'-O-methyluridine-3'-phosphate
  modified_base 13: mod_base = OTHER; note = 2'-O-methyladenosine-3'-phosphate
  modified_base 14: mod_base = OTHER; note = 2'-fluoroguanosine-3'-phosphate
  modified_base 15: mod_base = OTHER; note = 2'-O-methylguanosine-3'-phosphate
  modified_base 16: mod_base = OTHER; note = 2'-fluorocytidine-3'-phosphate
  modified_base 17: mod_base = OTHER; note = 2'-O-methyluridine-3'-phosphate
  modified_base 18: mod_base = OTHER; note = 2'-O-methyluridine-3'-phosphate
  modified_base 19: mod_base = OTHER; note = 2'-O-methyladenosine-3'-phosphate
  modified_base 20: mod_base = OTHER; note = 2'-O-methylguanosine-3'-phosphate
  modified_base 21: mod_base = OTHER; note = 2'-O-methyladenosine-3'- phosphorothioate
  modified_base 22: mod_base = OTHER; note = 2'-O-methyluridine-3'-phosphorothioate
  modified_base 23: mod_base = OTHER; note = 2'-O-methylguanosine-3'-phosphate
  misc_feature 1..4: note = RNA
  misc_feature 5: note = DNA
  misc_feature 6..23: note = RNA
tcagaccaacttaggcttagatg

SEQ ID NO: 1430 - DNA, 23 bp, synthetic construct
  source 1..23: mol_type = other DNA
  modified_base 1: mod_base = OTHER; note = Vinyl-phosphonate 2'-O-methyluridine-3'-phosphorothioate
  modified_base 2: mod_base = OTHER; note = 2'-fluoroguanosine-3'-phosphorothioate
  modified_base 3: mod_base = OTHER; note = 2'-O-methylcytidine-3'-phosphate
  modified_base 4: mod_base = OTHER; note = 2'-O-methyladenosine-3'-phosphate
  modified_base 6: mod_base = OTHER; note = 2'-O-methyladenosine-3'-phosphate
  modified_base 7: mod_base = OTHER; note = cytidine-2'-phosphate
  modified_base 8: mod_base = OTHER; note = 2'-O-methylcytidine-3'-phosphate
  modified_base 9: mod_base = OTHER; note = 2'-O-methyladenosine-3'-phosphate
  modified_base 10: mod_base = OTHER; note = 2'-O-methyladenosine-3'-phosphate
  modified_base 11: mod_base = OTHER; note = 2'-O-methylcytidine-3'-phosphate
  modified_base 12: mod_base = OTHER; note = 2'-O-methyluridine-3'-phosphate
  modified_base 13: mod_base = OTHER; note = 2'-O-methyluridine-3'-phosphate
  modified_base 14: mod_base = OTHER; note = 2'-fluoroadenosine-3'-phosphate
  modified_base 15: mod_base = OTHER; note = 2'-O-methylguanosine-3'-phosphate
  modified_base 16: mod_base = OTHER; note = 2'-fluoroguanosine-3'-phosphate
  modified_base 17: mod_base = OTHER; note = 2'-O-methylcytidine-3'-phosphate
  modified_base 18: mod_base = OTHER; note = 2'-O-methyluridine-3'-phosphate
  modified_base 19: mod_base = OTHER; note = 2'-O-methyluridine-3'-phosphate
  modified_base 20: mod_base = OTHER; note = 2'-O-methyladenosine-3'-phosphate
  modified_base 21: mod_base = OTHER; note = 2'-O-methylguanosine-3'- phosphorothioate
  modified_base 22: mod_base = OTHER; note = 2'-O-methyladenosine-3'- phosphorothioate
  modified_base 23: mod_base = OTHER; note = 2'-O-methyluridine-3'-phosphate
  misc_feature 1..4: note = RNA
  misc_feature 5: note = DNA
  misc_feature 6..23: note = RNA
tgcagaccaacttaggcttagat

SEQ ID NO: 1431 - DNA, 23 bp, synthetic construct
  source 1..23: mol_type = other DNA
  modified_base 1: mod_base = OTHER; note = Vinyl-phosphonate 2'-O-methyluridine-3'-phosphorothioate
  modified_base 2: mod_base = OTHER; note = 2'-fluorocytidine-3'-phosphorothioate
  modified_base 3: mod_base = OTHER; note = 2'-O-methyluridine-3'-phosphate
  modified_base 4: mod_base = OTHER; note = 2'-O-methylguanosine-3'-phosphate
  modified_base 6: mod_base = OTHER; note = 2'-O-methyladenosine-3'-phosphate
  modified_base 7: mod_base = OTHER; note = guanosine-2'-phosphate
  modified_base 8: mod_base = OTHER; note = 2'-O-methyladenosine-3'-phosphate
  modified_base 9: mod_base = OTHER; note = 2'-O-methylcytidine-3'-phosphate
  modified_base 10: mod_base = OTHER; note = 2'-O-methylcytidine-3'-phosphate
  modified_base 11: mod_base = OTHER; note = 2'-O-methyladenosine-3'-phosphate
  modified_base 12: mod_base = OTHER; note = 2'-O-methyladenosine-3'-phosphate
  modified_base 13: mod_base = OTHER; note = 2'-O-methylcytidine-3'-phosphate
  modified_base 14: mod_base = OTHER; note = 2'-fluorouridine-3'-phosphate
  modified_base 15: mod_base = OTHER; note = 2'-O-methyluridine-3'-phosphate
  modified_base 16: mod_base = OTHER; note = 2'-fluoroadenosine-3'-phosphate
  modified_base 17: mod_base = OTHER; note = 2'-O-methylguanosine-3'-phosphate
  modified_base 18: mod_base = OTHER; note = 2'-O-methylguanosine-3'-phosphate
  modified_base 19: mod_base = OTHER; note = 2'-O-methylcytidine-3'-phosphate
  modified_base 20: mod_base = OTHER; note = 2'-O-methyluridine-3'-phosphate
  modified_base 21: mod_base = OTHER; note = 2'-O-methyluridine-3'-phosphorothioate
  modified_base 22: mod_base = OTHER; note = 2'-O-methyladenosine-3'- phosphorothioate
  modified_base 23: mod_base = OTHER; note = 2'-O-methylguanosine-3'-phosphate
  misc_feature 1..4: note = RNA
  misc_feature 5: note = DNA
  misc_feature 6..23: note = RNA
tctgcagaccaacttaggcttag

SEQ ID NO: 1432 - DNA, 23 bp, synthetic construct
  source 1..23: mol_type = other DNA
  modified_base 1: mod_base = OTHER; note = Vinyl-phosphonate 2'-O-methyluridine-3'-phosphorothioate
  modified_base 2: mod_base = OTHER; note = 2'-fluoroguanosine-3'-phosphorothioate
  modified_base 3: mod_base = OTHER; note = 2'-O-methylcytidine-3'-phosphate
  modified_base 4: mod_base = OTHER; note = 2'-O-methylcytidine-3'-phosphate
  modified_base 6: mod_base = OTHER; note = 2'-O-methylguanosine-3'-phosphate
  modified_base 7: mod_base = OTHER; note = cytidine-2'-phosphate
  modified_base 8: mod_base = OTHER; note = 2'-O-methyladenosine-3'-phosphate
  modified_base 9: mod_base = OTHER; note = 2'-O-methylguanosine-3'-phosphate
  modified_base 10: mod_base = OTHER; note = 2'-O-methyladenosine-3'-phosphate
  modified_base 11: mod_base = OTHER; note = 2'-O-methylcytidine-3'-phosphate
  modified_base 12: mod_base = OTHER; note = 2'-O-methylcytidine-3'-phosphate
  modified_base 13: mod_base = OTHER; note = 2'-O-methyladenosine-3'-phosphate
  modified_base 14: mod_base = OTHER; note = 2'-fluoroadenosine-3'-phosphate
  modified_base 15: mod_base = OTHER; note = 2'-O-methylcytidine-3'-phosphate
  modified_base 16: mod_base = OTHER; note = 2'-fluorouridine-3'-phosphate
  modified_base 17: mod_base = OTHER; note = 2'-O-methyluridine-3'-phosphate
  modified_base 18: mod_base = OTHER; note = 2'-O-methyladenosine-3'-phosphate
  modified_base 19: mod_base = OTHER; note = 2'-O-methylguanosine-3'-phosphate
  modified_base 20: mod_base = OTHER; note = 2'-O-methylguanosine-3'-phosphate
  modified_base 21: mod_base = OTHER; note = 2'-O-methylcytidine-3'- phosphorothioate
  modified_base 22: mod_base = OTHER; note = 2'-O-methyluridine-3'-phosphorothioate
  modified_base 23: mod_base = OTHER; note = 2'-O-methyluridine-3'-phosphate
  misc_feature 1..4: note = RNA
  misc_feature 5: note = DNA
  misc_feature 6..23: note = RNA
tgcctgcagaccaacttaggctt

SEQ ID NO: 1433 - DNA, 23 bp, synthetic construct
  source 1..23: mol_type = other DNA
  modified_base 1: mod_base = OTHER; note = Vinyl-phosphonate 2'-O-methyluridine-3'-phosphorothioate
  modified_base 2: mod_base = OTHER; note = 2'-fluorocytidine-3'-phosphorothioate
  modified_base 3: mod_base = OTHER; note = 2'-O-methylguanosine-3'-phosphate
  modified_base 4: mod_base = OTHER; note = 2'-O-methylcytidine-3'-phosphate
  modified_base 6: mod_base = OTHER; note = 2'-O-methyluridine-3'-phosphate
  modified_base 7: mod_base = OTHER; note = guanosine-2'-phosphate
  modified_base 8: mod_base = OTHER; note = 2'-O-methylcytidine-3'-phosphate
  modified_base 9: mod_base = OTHER; note = 2'-O-methyladenosine-3'-phosphate
  modified_base 10: mod_base = OTHER; note = 2'-O-methylguanosine-3'-phosphate
  modified_base 11: mod_base = OTHER; note = 2'-O-methyladenosine-3'-phosphate
  modified_base 12: mod_base = OTHER; note = 2'-O-methylcytidine-3'-phosphate
  modified_base 13: mod_base = OTHER; note = 2'-O-methylcytidine-3'-phosphate
  modified_base 14: mod_base = OTHER; note = 2'-fluoroadenosine-3'-phosphate
  modified_base 15: mod_base = OTHER; note = 2'-O-methyladenosine-3'-phosphate
  modified_base 16: mod_base = OTHER; note = 2'-fluorocytidine-3'-phosphate
  modified_base 17: mod_base = OTHER; note = 2'-O-methyluridine-3'-phosphate
  modified_base 18: mod_base = OTHER; note = 2'-O-methyluridine-3'-phosphate
  modified_base 19: mod_base = OTHER; note = 2'-O-methyladenosine-3'-phosphate
  modified_base 20: mod_base = OTHER; note = 2'-O-methylguanosine-3'-phosphate
  modified_base 21: mod_base = OTHER; note = 2'-O-methylguanosine-3'- phosphorothioate
  modified_base 22: mod_base = OTHER; note = 2'-O-methylcytidine-3'- phosphorothioate
  modified_base 23: mod_base = OTHER; note = 2'-O-methyluridine-3'-phosphate
  misc_feature 1..4: note = RNA
  misc_feature 5: note = DNA
  misc_feature 6..23: note = RNA
tcgcctgcagaccaacttaggct

SEQ ID NO: 1434 - DNA, 23 bp, synthetic construct
  source 1..23: mol_type = other DNA
  modified_base 1: mod_base = OTHER; note = Vinyl-phosphonate 2'-O-methyluridine-3'-phosphorothioate
  modified_base 2: mod_base = OTHER; note = 2'-fluoroadenosine-3'-phosphorothioate
  modified_base 3: mod_base = OTHER; note = 2'-O-methyladenosine-3'-phosphate
  modified_base 4: mod_base = OTHER; note = 2'-O-methylcytidine-3'-phosphate
  modified_base 6: mod_base = OTHER; note = 2'-O-methylcytidine-3'-phosphate
  modified_base 7: mod_base = OTHER; note = cytidine-2'-phosphate
  modified_base 8: mod_base = OTHER; note = 2'-O-methyluridine-3'-phosphate
  modified_base 9: mod_base = OTHER; note = 2'-O-methylguanosine-3'-phosphate
  modified_base 10: mod_base = OTHER; note = 2'-O-methylcytidine-3'-phosphate
  modified_base 11: mod_base = OTHER; note = 2'-O-methyladenosine-3'-phosphate
  modified_base 12: mod_base = OTHER; note = 2'-O-methylguanosine-3'-phosphate
  modified_base 13: mod_base = OTHER; note = 2'-O-methyladenosine-3'-phosphate
  modified_base 14: mod_base = OTHER; note = 2'-fluorocytidine-3'-phosphate
  modified_base 15: mod_base = OTHER; note = 2'-O-methylcytidine-3'-phosphate
  modified_base 16: mod_base = OTHER; note = 2'-fluoroadenosine-3'-phosphate
  modified_base 17: mod_base = OTHER; note = 2'-O-methyladenosine-3'-phosphate
  modified_base 18: mod_base = OTHER; note = 2'-O-methylcytidine-3'-phosphate
  modified_base 19: mod_base = OTHER; note = 2'-O-methyluridine-3'-phosphate
  modified_base 20: mod_base = OTHER; note = 2'-O-methyluridine-3'-phosphate
  modified_base 21: mod_base = OTHER; note = 2'-O-methyladenosine-3'- phosphorothioate
  modified_base 22: mod_base = OTHER; note = 2'-O-methylguanosine-3'- phosphorothioate
  modified_base 23: mod_base = OTHER; note = 2'-O-methylguanosine-3'-phosphate
  misc_feature 1..4: note = RNA
  misc_feature 5: note = DNA
  misc_feature 6..23: note = RNA
taacgcctgcagaccaacttagg

SEQ ID NO: 1435 - DNA, 23 bp, synthetic construct
  source 1..23: mol_type = other DNA
  modified_base 1: mod_base = OTHER; note = Vinyl-phosphonate 2'-O-methyluridine-3'-phosphorothioate
  modified_base 2: mod_base = OTHER; note = 2'-fluorouridine -3'-phosphorothioate
  modified_base 3: mod_base = OTHER; note = 2'-O-methylcytidine-3'-phosphate
  modified_base 4: mod_base = OTHER; note = 2'-O-methyladenosine-3'-phosphate
  modified_base 6: mod_base = OTHER; note = 2'-O-methyluridine-3'-phosphate
  modified_base 7: mod_base = OTHER; note = cytidine-2'-phosphate
  modified_base 8: mod_base = OTHER; note = 2'-O-methyladenosine-3'-phosphate
  modified_base 9: mod_base = OTHER; note = 2'-O-methyladenosine-3'-phosphate
  modified_base 10: mod_base = OTHER; note = 2'-O-methyladenosine-3'-phosphate
  modified_base 11: mod_base = OTHER; note = 2'-O-methylcytidine-3'-phosphate
  modified_base 12: mod_base = OTHER; note = 2'-O-methylguanosine-3'-phosphate
  modified_base 13: mod_base = OTHER; note = 2'-O-methylcytidine-3'-phosphate
  modified_base 14: mod_base = OTHER; note = 2'-fluorocytidine-3'-phosphate
  modified_base 15: mod_base = OTHER; note = 2'-O-methyluridine-3'-phosphate
  modified_base 16: mod_base = OTHER; note = 2'-fluoroguanosine-3'-phosphate
  modified_base 17: mod_base = OTHER; note = 2'-O-methylcytidine-3'-phosphate
  modified_base 18: mod_base = OTHER; note = 2'-O-methyladenosine-3'-phosphate
  modified_base 19: mod_base = OTHER; note = 2'-O-methylguanosine-3'-phosphate
  modified_base 20: mod_base = OTHER; note = 2'-O-methyladenosine-3'-phosphate
  modified_base 21: mod_base = OTHER; note = 2'-O-methylcytidine-3'- phosphorothioate
  modified_base 22: mod_base = OTHER; note = 2'-O-methylcytidine-3'- phosphorothioate
  modified_base 23: mod_base = OTHER; note = 2'-O-methyladenosine-3'-phosphate
  misc_feature 1..4: note = RNA
  misc_feature 5: note = DNA
  misc_feature 6..23: note = RNA
ttcattcaaacgcctgcagacca

SEQ ID NO: 1436 - DNA, 23 bp, synthetic construct
  source 1..23: mol_type = other DNA
  modified_base 1: mod_base = OTHER; note = Vinyl-phosphonate 2'-O-methyluridine-3'-phosphorothioate
  modified_base 2: mod_base = OTHER; note = 2'-fluorocytidine-3'-phosphorothioate
  modified_base 3: mod_base = OTHER; note = 2'-O-methyladenosine-3'-phosphate
  modified_base 4: mod_base = OTHER; note = 2'-O-methyladenosine-3'-phosphate
  modified_base 6: mod_base = OTHER; note = 2'-O-methyluridine-3'-phosphate
  modified_base 7: mod_base = OTHER; note = cytidine-2'-phosphate
  modified_base 8: mod_base = OTHER; note = 2'-O-methyladenosine-3'-phosphate
  modified_base 9: mod_base = OTHER; note = 2'-O-methyluridine-3'-phosphate
  modified_base 10: mod_base = OTHER; note = 2'-O-methyluridine-3'-phosphate
  modified_base 11: mod_base = OTHER; note = 2'-O-methylcytidine-3'-phosphate
  modified_base 12: mod_base = OTHER; note = 2'-O-methyladenosine-3'-phosphate
  modified_base 13: mod_base = OTHER; note = 2'-O-methyladenosine-3'-phosphate
  modified_base 14: mod_base = OTHER; note = 2'-fluoroadenosine-3'-phosphate
  modified_base 15: mod_base = OTHER; note = 2'-O-methylcytidine-3'-phosphate
  modified_base 16: mod_base = OTHER; note = 2'-fluoroguanosine-3'-phosphate
  modified_base 17: mod_base = OTHER; note = 2'-O-methylcytidine-3'-phosphate
  modified_base 18: mod_base = OTHER; note = 2'-O-methylcytidine-3'-phosphate
  modified_base 19: mod_base = OTHER; note = 2'-O-methyluridine-3'-phosphate
  modified_base 20: mod_base = OTHER; note = 2'-O-methylguanosine-3'-phosphate
  modified_base 21: mod_base = OTHER; note = 2'-O-methylcytidine-3'- phosphorothioate
  modified_base 22: mod_base = OTHER; note = 2'-O-methyladenosine-3'- phosphorothioate
  modified_base 23: mod_base = OTHER; note = 2'-O-methylguanosine-3'-phosphate
  misc_feature 1..4: note = RNA
  misc_feature 5: note = DNA
  misc_feature 6..23: note = RNA
tcaactcattcaaacgcctgcag

SEQ ID NO: 1437 - DNA, 23 bp, synthetic construct
  source 1..23: mol_type = other DNA
  modified_base 1: mod_base = OTHER; note = Vinyl-phosphonate 2'-O-methyluridine-3'-phosphorothioate
  modified_base 2: mod_base = OTHER; note = 2'-fluoroguanosine-3'-phosphorothioate
  modified_base 3: mod_base = OTHER; note = 2'-O-methylcytidine-3'-phosphate
  modified_base 4: mod_base = OTHER; note = 2'-O-methyladenosine-3'-phosphate
  modified_base 6: mod_base = OTHER; note = 2'-O-methylcytidine-3'-phosphate
  modified_base 7: mod_base = OTHER; note = cytidine-2'-phosphate
  modified_base 8: mod_base = OTHER; note = 2'-O-methyladenosine-3'-phosphate
  modified_base 9: mod_base = OTHER; note = 2'-O-methylcytidine-3'-phosphate
  modified_base 10: mod_base = OTHER; note = 2'-O-methyladenosine-3'-phosphate
  modified_base 11: mod_base = OTHER; note = 2'-O-methyladenosine-3'-phosphate
  modified_base 12: mod_base = OTHER; note = 2'-O-methylcytidine-3'-phosphate
  modified_base 13: mod_base = OTHER; note = 2'-O-methyluridine-3'-phosphate
  modified_base 14: mod_base = OTHER; note = 2'-fluorocytidine-3'-phosphate
  modified_base 15: mod_base = OTHER; note = 2'-O-methyladenosine-3'-phosphate
  modified_base 16: mod_base = OTHER; note = 2'-fluorouridine-3'-phosphate
  modified_base 17: mod_base = OTHER; note = 2'-O-methyluridine-3'-phosphate
  modified_base 18: mod_base = OTHER; note = 2'-O-methylcytidine-3'-phosphate
  modified_base 19: mod_base = OTHER; note = 2'-O-methyladenosine-3'-phosphate
  modified_base 20: mod_base = OTHER; note = 2'-O-methyladenosine-3'-phosphate
  modified_base 21: mod_base = OTHER; note = 2'-O-methyladenosine-3'- phosphorothioate
  modified_base 22: mod_base = OTHER; note = 2'-O-methylcytidine-3'- phosphorothioate
  modified_base 23: mod_base = OTHER; note = 2'-O-methylguanosine-3'-phosphate
  misc_feature 1..4: note = RNA
  misc_feature 5: note = DNA
  misc_feature 6..23: note = RNA
tgcaaccacaactcattcaaacg

SEQ ID NO: 1438 - DNA, 23 bp, synthetic construct
  source 1..23: mol_type = other DNA
  modified_base 1: mod_base = OTHER; note = Vinyl-phosphonate 2'-O-methyluridine-3'-phosphorothioate
  modified_base 2: mod_base = OTHER; note = 2'-fluoroguanosine-3'-phosphorothioate
  modified_base 3: mod_base = OTHER; note = 2'-O-methylguanosine-3'-phosphate
  modified_base 4: mod_base = OTHER; note = 2'-O-methylcytidine-3'-phosphate
  modified_base 6: mod_base = OTHER; note = 2'-O-methyladenosine-3'-phosphate
  modified_base 7: mod_base = OTHER; note = cytidine-2'-phosphate
  modified_base 8: mod_base = OTHER; note = 2'-O-methylcytidine-3'-phosphate
  modified_base 9: mod_base = OTHER; note = 2'-O-methyladenosine-3'-phosphate
  modified_base 10: mod_base = OTHER; note = 2'-O-methylcytidine-3'-phosphate
  modified_base 11: mod_base = OTHER; note = 2'-O-methyladenosine-3'-phosphate
  modified_base 12: mod_base = OTHER; note = 2'-O-methyladenosine-3'-phosphate
  modified_base 13: mod_base = OTHER; note = 2'-O-methylcytidine-3'-phosphate
  modified_base 14: mod_base = OTHER; note = 2'-fluorouridine-3'-phosphate
  modified_base 15: mod_base = OTHER; note = 2'-O-methylcytidine-3'-phosphate
  modified_base 16: mod_base = OTHER; note = 2'-fluoroadenosine-3'-phosphate
  modified_base 17: mod_base = OTHER; note = 2'-O-methyluridine-3'-phosphate
  modified_base 18: mod_base = OTHER; note = 2'-O-methyluridine-3'-phosphate
  modified_base 19: mod_base = OTHER; note = 2'-O-methylcytidine-3'-phosphate
  modified_base 20: mod_base = OTHER; note = 2'-O-methyladenosine-3'-phosphate
  modified_base 21: mod_base = OTHER; note = 2'-O-methyladenosine-3'- phosphorothioate
  modified_base 22: mod_base = OTHER; note = 2'-O-methyladenosine-3'- phosphorothioate
  modified_base 23: mod_base = OTHER; note = 2'-O-methylcytidine-3'-phosphate
  misc_feature 1..4: note = RNA
  misc_feature 5: note = DNA
  misc_feature 6..23: note = RNA
tggcaaccacaactcattcaaac

SEQ ID NO: 1439 - DNA, 23 bp, synthetic construct
  source 1..23: mol_type = other DNA
  modified_base 1: mod_base = OTHER; note = Vinyl-phosphonate 2'-O-methyluridine-3'-phosphorothioate
  modified_base 2: mod_base = OTHER; note = 2'-fluorocytidine-3'-phosphorothioate
  modified_base 3: mod_base = OTHER; note = 2'-O-methyluridine-3'-phosphate
  modified_base 4: mod_base = OTHER; note = 2'-O-methyluridine-3'-phosphate
  modified_base 6: mod_base = OTHER; note = 2'-O-methylguanosine-3'-phosphate
  modified_base 7: mod_base = OTHER; note = cytidine-2'-phosphate
  modified_base 8: mod_base = OTHER; note = 2'-O-methyladenosine-3'-phosphate
  modified_base 9: mod_base = OTHER; note = 2'-O-methyladenosine-3'-phosphate
  modified_base 10: mod_base = OTHER; note = 2'-O-methylcytidine-3'-phosphate
  modified_base 11: mod_base = OTHER; note = 2'-O-methylcytidine-3'-phosphate
  modified_base 12: mod_base = OTHER; note = 2'-O-methyladenosine-3'-phosphate
  modified_base 13: mod_base = OTHER; note = 2'-O-methylcytidine-3'-phosphate
  modified_base 14: mod_base = OTHER; note = 2'-fluoroadenosine-3'-phosphate
  modified_base 15: mod_base = OTHER; note = 2'-O-methyladenosine-3'-phosphate
  modified_base 16: mod_base = OTHER; note = 2'-fluorocytidine-3'-phosphate
  modified_base 17: mod_base = OTHER; note = 2'-O-methyluridine-3'-phosphate
  modified_base 18: mod_base = OTHER; note = 2'-O-methylcytidine-3'-phosphate
  modified_base 19: mod_base = OTHER; note = 2'-O-methyladenosine-3'-phosphate
  modified_base 20: mod_base = OTHER; note = 2'-O-methyluridine-3'-phosphate
  modified_base 21: mod_base = OTHER; note = 2'-O-methyluridine-3'-phosphorothioate
  modified_base 22: mod_base = OTHER; note = 2'-O-methylcytidine-3'- phosphorothioate
  modified_base 23: mod_base = OTHER; note = 2'-O-methyladenosine-3'-phosphate
  misc_feature 1..4: note = RNA
  misc_feature 5: note = DNA
  misc_feature 6..23: note = RNA
tcttggcaaccacaactcattca

SEQ ID NO: 1440 - DNA, 23 bp, synthetic construct
  source 1..23: mol_type = other DNA
  modified_base 1: mod_base = OTHER; note = Vinyl-phosphonate 2'-O-methyluridine-3'-phosphorothioate
  modified_base 2: mod_base = OTHER; note = 2'-fluoroadenosine-3'-phosphorothioate
  modified_base 3: mod_base = OTHER; note = 2'-O-methylcytidine-3'-phosphate
  modified_base 4: mod_base = OTHER; note = 2'-O-methyluridine-3'-phosphate
  modified_base 6: mod_base = OTHER; note = 2'-O-methylguanosine-3'-phosphate
  modified_base 7: mod_base = OTHER; note = guanosine-2'-phosphate
  modified_base 8: mod_base = OTHER; note = 2'-O-methylcytidine-3'-phosphate
  modified_base 9: mod_base = OTHER; note = 2'-O-methyladenosine-3'-phosphate
  modified_base 10: mod_base = OTHER; note = 2'-O-methyladenosine-3'-phosphate
  modified_base 11: mod_base = OTHER; note = 2'-O-methylcytidine-3'-phosphate
  modified_base 12: mod_base = OTHER; note = 2'-O-methylcytidine-3'-phosphate
  modified_base 13: mod_base = OTHER; note = 2'-O-methyladenosine-3'-phosphate
  modified_base 14: mod_base = OTHER; note = 2'-fluorocytidine-3'-phosphate
  modified_base 15: mod_base = OTHER; note = 2'-O-methyladenosine-3'-phosphate
  modified_base 16: mod_base = OTHER; note = 2'-fluoroadenosine-3'-phosphate
  modified_base 17: mod_base = OTHER; note = 2'-O-methylcytidine-3'-phosphate
  modified_base 18: mod_base = OTHER; note = 2'-O-methyluridine-3'-phosphate
  modified_base 19: mod_base = OTHER; note = 2'-O-methylcytidine-3'-phosphate
  modified_base 20: mod_base = OTHER; note = 2'-O-methyladenosine-3'-phosphate
  modified_base 21: mod_base = OTHER; note = 2'-O-methyluridine-3'-phosphorothioate
  modified_base 22: mod_base = OTHER; note = 2'-O-methyluridine-3'-phosphorothioate
  modified_base 23: mod_base = OTHER; note = 2'-O-methylcytidine-3'-phosphate
  misc_feature 1..4: note = RNA
  misc_feature 5: note = DNA
  misc_feature 6..23: note = RNA
tacttggcaaccacaactcattc

SEQ ID NO: 1441 - DNA, 23 bp, synthetic construct
  source 1..23: mol_type = other DNA
  modified_base 1: mod_base = OTHER; note = Vinyl-phosphonate 2'-O-methyluridine-3'-phosphorothioate
  modified_base 2: mod_base = OTHER; note = 2'-fluorouridine -3'-phosphorothioate
  modified_base 3: mod_base = OTHER; note = 2'-O-methyladenosine-3'-phosphate
  modified_base 4: mod_base = OTHER; note = 2'-O-methylcytidine-3'-phosphate
  modified_base 6: mod_base = OTHER; note = 2'-O-methyluridine-3'-phosphate
  modified_base 7: mod_base = OTHER; note = guanosine-2'-phosphate
  modified_base 8: mod_base = OTHER; note = 2'-O-methylguanosine-3'-phosphate
  modified_base 9: mod_base = OTHER; note = 2'-O-methylcytidine-3'-phosphate
  modified_base 10: mod_base = OTHER; note = 2'-O-methyladenosine-3'-phosphate
  modified_base 11: mod_base = OTHER; note = 2'-O-methyladenosine-3'-phosphate
  modified_base 12: mod_base = OTHER; note = 2'-O-methylcytidine-3'-phosphate
  modified_base 13: mod_base = OTHER; note = 2'-O-methylcytidine-3'-phosphate
  modified_base 14: mod_base = OTHER; note = 2'-fluoroadenosine-3'-phosphate
  modified_base 15: mod_base = OTHER; note = 2'-O-methylcytidine-3'-phosphate
  modified_base 16: mod_base = OTHER; note = 2'-fluoroadenosine-3'-phosphate
  modified_base 17: mod_base = OTHER; note = 2'-O-methyladenosine-3'-phosphate
  modified_base 18: mod_base = OTHER; note = 2'-O-methylcytidine-3'-phosphate
  modified_base 19: mod_base = OTHER; note = 2'-O-methyluridine-3'-phosphate
  modified_base 20: mod_base = OTHER; note = 2'-O-methylcytidine-3'-phosphate
  modified_base 21: mod_base = OTHER; note = 2'-O-methyladenosine-3'- phosphorothioate
  modified_base 22: mod_base = OTHER; note = 2'-O-methyluridine-3'-phosphorothioate
  modified_base 23: mod_base = OTHER; note = 2'-O-methyluridine-3'-phosphate
  misc_feature 1..4: note = RNA
  misc_feature 5: note = DNA
  misc_feature 6..23: note = RNA
ttacttggcaaccacaactcatt

SEQ ID NO: 1442 - DNA, 23 bp, synthetic construct
  source 1..23: mol_type = other DNA
  modified_base 1: mod_base = OTHER; note = Vinyl-phosphonate 2'-O-methyluridine-3'-phosphorothioate
  modified_base 2: mod_base = OTHER; note = 2'-fluorouridine -3'-phosphorothioate
  modified_base 3: mod_base = OTHER; note = 2'-O-methyluridine-3'-phosphate
  modified_base 4: mod_base = OTHER; note = 2'-O-methylcytidine-3'-phosphate
  modified_base 6: mod_base = OTHER; note = 2'-O-methylcytidine-3'-phosphate
  modified_base 7: mod_base = OTHER; note = cytidine-2'-phosphate
  modified_base 8: mod_base = OTHER; note = 2'-O-methyladenosine-3'-phosphate
  modified_base 9: mod_base = OTHER; note = 2'-O-methylcytidine-3'-phosphate
  modified_base 10: mod_base = OTHER; note = 2'-O-methyluridine-3'-phosphate
  modified_base 11: mod_base = OTHER; note = 2'-O-methyluridine-3'-phosphate
  modified_base 12: mod_base = OTHER; note = 2'-O-methyluridine-3'-phosphate
  modified_base 13: mod_base = OTHER; note = 2'-O-methyladenosine-3'-phosphate
  modified_base 14: mod_base = OTHER; note = 2'-fluorocytidine-3'-phosphate
  modified_base 15: mod_base = OTHER; note = 2'-O-methyluridine-3'-phosphate
  modified_base 16: mod_base = OTHER; note = 2'-fluorouridine-3'-phosphate
  modified_base 17: mod_base = OTHER; note = 2'-O-methylguanosine-3'-phosphate
  modified_base 18: mod_base = OTHER; note = 2'-O-methylguanosine-3'-phosphate
  modified_base 19: mod_base = OTHER; note = 2'-O-methylcytidine-3'-phosphate
  modified_base 20: mod_base = OTHER; note = 2'-O-methyladenosine-3'-phosphate
  modified_base 21: mod_base = OTHER; note = 2'-O-methyladenosine-3'- phosphorothioate
  modified_base 22: mod_base = OTHER; note = 2'-O-methylcytidine-3'- phosphorothioate
  modified_base 23: mod_base = OTHER; note = 2'-O-methylcytidine-3'-phosphate
  misc_feature 1..4: note = RNA
  misc_feature 5: note = DNA
  misc_feature 6..23: note = RNA
tttcaccactttacttggcaacc

SEQ ID NO: 1443 - DNA, 23 bp, synthetic construct
  source 1..23: mol_type = other DNA
  modified_base 1: mod_base = OTHER; note = Vinyl-phosphonate 2'-O-methyluridine-3'-phosphorothioate
  modified_base 2: mod_base = OTHER; note = 2'-fluoroguanosine-3'-phosphorothioate
  modified_base 3: mod_base = OTHER; note = 2'-O-methyluridine-3'-phosphate
  modified_base 4: mod_base = OTHER; note = 2'-O-methyluridine-3'-phosphate
  modified_base 6: mod_base = OTHER; note = 2'-O-methyladenosine-3'-phosphate
  modified_base 7: mod_base = OTHER; note = cytidine-2'-phosphate
  modified_base 8: mod_base = OTHER; note = 2'-O-methylcytidine-3'-phosphate
  modified_base 9: mod_base = OTHER; note = 2'-O-methyladenosine-3'-phosphate
  modified_base 10: mod_base = OTHER; note = 2'-O-methylcytidine-3'-phosphate
  modified_base 11: mod_base = OTHER; note = 2'-O-methyluridine-3'-phosphate
  modified_base 12: mod_base = OTHER; note = 2'-O-methyluridine-3'-phosphate
  modified_base 13: mod_base = OTHER; note = 2'-O-methyluridine-3'-phosphate
  modified_base 14: mod_base = OTHER; note = 2'-fluoroadenosine-3'-phosphate
  modified_base 15: mod_base = OTHER; note = 2'-O-methylcytidine-3'-phosphate
  modified_base 16: mod_base = OTHER; note = 2'-fluorouridine-3'-phosphate
  modified_base 17: mod_base = OTHER; note = 2'-O-methyluridine-3'-phosphate
  modified_base 18: mod_base = OTHER; note = 2'-O-methylguanosine-3'-phosphate
  modified_base 19: mod_base = OTHER; note = 2'-O-methylguanosine-3'-phosphate
  modified_base 20: mod_base = OTHER; note = 2'-O-methylcytidine-3'-phosphate
  modified_base 21: mod_base = OTHER; note = 2'-O-methyladenosine-3'- phosphorothioate
  modified_base 22: mod_base = OTHER; note = 2'-O-methyladenosine-3'- phosphorothioate
  modified_base 23: mod_base = OTHER; note = 2'-O-methylcytidine-3'-phosphate
  misc_feature 1..4: note = RNA
  misc_feature 5: note = DNA
  misc_feature 6..23: note = RNA
tgttcaccactttacttggcaac

SEQ ID NO: 1444 - DNA, 23 bp, synthetic construct
  source 1..23: mol_type = other DNA
  modified_base 1: mod_base = OTHER; note = Vinyl-phosphonate 2'-O-methyluridine-3'-phosphorothioate
  modified_base 2: mod_base = OTHER; note = 2'-fluoroadenosine-3'-phosphorothioate
  modified_base 3: mod_base = OTHER; note = 2'-O-methyladenosine-3'-phosphate
  modified_base 4: mod_base = OTHER; note = 2'-O-methylguanosine-3'-phosphate
  modified_base 6: mod_base = OTHER; note = 2'-O-methyluridine-3'-phosphate
  modified_base 7: mod_base = OTHER; note = cytidine-2'-phosphate
  modified_base 8: mod_base = OTHER; note = 2'-O-methyladenosine-3'-phosphate
  modified_base 9: mod_base = OTHER; note = 2'-O-methylcytidine-3'-phosphate
  modified_base 10: mod_base = OTHER; note = 2'-O-methylcytidine-3'-phosphate
  modified_base 11: mod_base = OTHER; note = 2'-O-methyladenosine-3'-phosphate
  modified_base 12: mod_base = OTHER; note = 2'-O-methylcytidine-3'-phosphate
  modified_base 13: mod_base = OTHER; note = 2'-O-methyluridine-3'-phosphate
  modified_base 14: mod_base = OTHER; note = 2'-fluorouridine-3'-phosphate
  modified_base 15: mod_base = OTHER; note = 2'-O-methyluridine-3'-phosphate
  modified_base 16: mod_base = OTHER; note = 2'-fluoroadenosine-3'-phosphate
  modified_base 17: mod_base = OTHER; note = 2'-O-methylcytidine-3'-phosphate
  modified_base 18: mod_base = OTHER; note = 2'-O-methyluridine-3'-phosphate
  modified_base 19: mod_base = OTHER; note = 2'-O-methyluridine-3'-phosphate
  modified_base 20: mod_base = OTHER; note = 2'-O-methylguanosine-3'-phosphate
  modified_base 21: mod_base = OTHER; note = 2'-O-methylguanosine-3'- phosphorothioate
  modified_base 22: mod_base = OTHER; note = 2'-O-methylcytidine-3'- phosphorothioate
  modified_base 23: mod_base = OTHER; note = 2'-O-methyladenosine-3'-phosphate
  misc_feature 1..4: note = RNA
  misc_feature 5: note = DNA
  misc_feature 6..23: note = RNA
taagttcaccactttacttggca

SEQ ID NO: 1445 - DNA, 23 bp, synthetic construct
  source 1..23: mol_type = other DNA
  modified_base 1: mod_base = OTHER; note = Vinyl-phosphonate 2'-O-methyluridine-3'-phosphorothioate
  modified_base 2: mod_base = OTHER; note = 2'-fluorocytidine-3'-phosphorothioate
  modified_base 3: mod_base = OTHER; note = 2'-O-methylguanosine-3'-phosphate
  modified_base 4: mod_base = OTHER; note = 2'-O-methyluridine-3'-phosphate
  modified_base 6: mod_base = OTHER; note = 2'-O-methyladenosine-3'-phosphate
  modified_base 7: mod_base = OTHER; note = guanosine-2'-phosphate
  modified_base 8: mod_base = OTHER; note = 2'-O-methyluridine-3'-phosphate
  modified_base 9: mod_base = OTHER; note = 2'-O-methyluridine-3'-phosphate
  modified_base 10: mod_base = OTHER; note = 2'-O-methylcytidine-3'-phosphate
  modified_base 11: mod_base = OTHER; note = 2'-O-methyladenosine-3'-phosphate
  modified_base 12: mod_base = OTHER; note = 2'-O-methylcytidine-3'-phosphate
  modified_base 13: mod_base = OTHER; note = 2'-O-methylcytidine-3'-phosphate
  modified_base 14: mod_base = OTHER; note = 2'-fluoroadenosine-3'-phosphate
  modified_base 15: mod_base = OTHER; note = 2'-O-methylcytidine-3'-phosphate
  modified_base 16: mod_base = OTHER; note = 2'-fluorouridine-3'-phosphate
  modified_base 17: mod_base = OTHER; note = 2'-O-methyluridine-3'-phosphate
  modified_base 18: mod_base = OTHER; note = 2'-O-methyluridine-3'-phosphate
  modified_base 19: mod_base = OTHER; note = 2'-O-methyladenosine-3'-phosphate
  modified_base 20: mod_base = OTHER; note = 2'-O-methylcytidine-3'-phosphate
  modified_base 21: mod_base = OTHER; note = 2'-O-methyluridine-3'-phosphorothioate
  modified_base 22: mod_base = OTHER; note = 2'-O-methyluridine-3'-phosphorothioate
  modified_base 23: mod_base = OTHER; note = 2'-O-methylguanosine-3'-phosphate
  misc_feature 1..4: note = RNA
  misc_feature 5: note = DNA
  misc_feature 6..23: note = RNA
tcgtaagttcaccactttacttg

SEQ ID NO: 1446 - DNA, 23 bp, synthetic construct
  source 1..23: mol_type = other DNA
  modified_base 1: mod_base = OTHER; note = Vinyl-phosphonate 2'-O-methyluridine-3'-phosphorothioate
  modified_base 2: mod_base = OTHER; note = 2'-fluoroadenosine-3'-phosphorothioate
  modified_base 3: mod_base = OTHER; note = 2'-O-methyluridine-3'-phosphate
  modified_base 4: mod_base = OTHER; note = 2'-O-methylcytidine-3'-phosphate
  modified_base 6: mod_base = OTHER; note = 2'-O-methylcytidine-3'-phosphate
  modified_base 7: mod_base = OTHER; note = cytidine-2'-phosphate
  modified_base 8: mod_base = OTHER; note = 2'-O-methyladenosine-3'-phosphate
  modified_base 9: mod_base = OTHER; note = 2'-O-methylcytidine-3'-phosphate
  modified_base 10: mod_base = OTHER; note = 2'-O-methylguanosine-3'-phosphate
  modified_base 11: mod_base = OTHER; note = 2'-O-methyluridine-3'-phosphate
  modified_base 12: mod_base = OTHER; note = 2'-O-methyladenosine-3'-phosphate
  modified_base 13: mod_base = OTHER; note = 2'-O-methyladenosine-3'-phosphate
  modified_base 14: mod_base = OTHER; note = 2'-fluoroguanosine-3'-phosphate
  modified_base 15: mod_base = OTHER; note = 2'-O-methyluridine-3'-phosphate
  modified_base 16: mod_base = OTHER; note = 2'-fluorouridine-3'-phosphate
  modified_base 17: mod_base = OTHER; note = 2'-O-methylcytidine-3'-phosphate
  modified_base 18: mod_base = OTHER; note = 2'-O-methyladenosine-3'-phosphate
  modified_base 19: mod_base = OTHER; note = 2'-O-methylcytidine-3'-phosphate
  modified_base 20: mod_base = OTHER; note = 2'-O-methylcytidine-3'-phosphate
  modified_base 21: mod_base = OTHER; note = 2'-O-methyladenosine-3'- phosphorothioate
  modified_base 22: mod_base = OTHER; note = 2'-O-methylcytidine-3'- phosphorothioate
  modified_base 23: mod_base = OTHER; note = 2'-O-methyluridine-3'-phosphate
  misc_feature 1..4: note = RNA
  misc_feature 5: note = DNA
  misc_feature 6..23: note = RNA
tatcaccacgtaagttcaccact

SEQ ID NO: 1447 - DNA, 23 bp, synthetic construct
  source 1..23: mol_type = other DNA
  modified_base 1: mod_base = OTHER; note = Vinyl-phosphonate 2'-O-methyluridine-3'-phosphorothioate
  modified_base 2: mod_base = OTHER; note = 2'-fluorouridine -3'-phosphorothioate
  modified_base 3: mod_base = OTHER; note = 2'-O-methyluridine-3'-phosphate
  modified_base 4: mod_base = OTHER; note = 2'-O-methyladenosine-3'-phosphate
  modified_base 6: mod_base = OTHER; note = 2'-O-methyluridine-3'-phosphate
  modified_base 7: mod_base = OTHER; note = cytidine-2'-phosphate
  modified_base 8: mod_base = OTHER; note = 2'-O-methyladenosine-3'-phosphate
  modified_base 9: mod_base = OTHER; note = 2'-O-methylcytidine-3'-phosphate
  modified_base 10: mod_base = OTHER; note = 2'-O-methylcytidine-3'-phosphate
  modified_base 11: mod_base = OTHER; note = 2'-O-methyladenosine-3'-phosphate
  modified_base 12: mod_base = OTHER; note = 2'-O-methylcytidine-3'-phosphate
  modified_base 13: mod_base = OTHER; note = 2'-O-methylguanosine-3'-phosphate
  modified_base 14: mod_base = OTHER; note = 2'-fluorouridine-3'-phosphate
  modified_base 15: mod_base = OTHER; note = 2'-O-methyladenosine-3'-phosphate
  modified_base 16: mod_base = OTHER; note = 2'-fluoroadenosine-3'-phosphate
  modified_base 17: mod_base = OTHER; note = 2'-O-methylguanosine-3'-phosphate
  modified_base 18: mod_base = OTHER; note = 2'-O-methyluridine-3'-phosphate
  modified_base 19: mod_base = OTHER; note = 2'-O-methyluridine-3'-phosphate
  modified_base 20: mod_base = OTHER; note = 2'-O-methylcytidine-3'-phosphate
  modified_base 21: mod_base = OTHER; note = 2'-O-methyladenosine-3'- phosphorothioate
  modified_base 22: mod_base = OTHER; note = 2'-O-methylcytidine-3'- phosphorothioate
  modified_base 23: mod_base = OTHER; note = 2'-O-methylcytidine-3'-phosphate
  misc_feature 1..4: note = RNA
  misc_feature 5: note = DNA
  misc_feature 6..23: note = RNA
tttaatcaccacgtaagttcacc

SEQ ID NO: 1448 - DNA, 23 bp, synthetic construct
  source 1..23: mol_type = other DNA
  modified_base 1: mod_base = OTHER; note = Vinyl-phosphonate 2'-O-methyluridine-3'-phosphorothioate
  modified_base 2: mod_base = OTHER; note = 2'-fluoroadenosine-3'-phosphorothioate
  modified_base 3: mod_base = OTHER; note = 2'-O-methyladenosine-3'-phosphate
  modified_base 4: mod_base = OTHER; note = 2'-O-methyluridine-3'-phosphate
  modified_base 6: mod_base = OTHER; note = 2'-O-methyluridine-3'-phosphate
  modified_base 7: mod_base = OTHER; note = cytidine-2'-phosphate
  modified_base 8: mod_base = OTHER; note = 2'-O-methyladenosine-3'-phosphate
  modified_base 9: mod_base = OTHER; note = 2'-O-methyluridine-3'-phosphate
  modified_base 10: mod_base = OTHER; note = 2'-O-methyluridine-3'-phosphate
  modified_base 11: mod_base = OTHER; note = 2'-O-methyladenosine-3'-phosphate
  modified_base 12: mod_base = OTHER; note = 2'-O-methyladenosine-3'-phosphate
  modified_base 13: mod_base = OTHER; note = 2'-O-methyluridine-3'-phosphate
  modified_base 14: mod_base = OTHER; note = 2'-fluorocytidine-3'-phosphate
  modified_base 15: mod_base = OTHER; note = 2'-O-methyladenosine-3'-phosphate
  modified_base 16: mod_base = OTHER; note = 2'-fluorocytidine-3'-phosphate
  modified_base 17: mod_base = OTHER; note = 2'-O-methylcytidine-3'-phosphate
  modified_base 18: mod_base = OTHER; note = 2'-O-methyladenosine-3'-phosphate
  modified_base 19: mod_base = OTHER; note = 2'-O-methylcytidine-3'-phosphate
  modified_base 20: mod_base = OTHER; note = 2'-O-methylguanosine-3'-phosphate
  modified_base 21: mod_base = OTHER; note = 2'-O-methyluridine-3'-phosphorothioate
  modified_base 22: mod_base = OTHER; note = 2'-O-methyladenosine-3'- phosphorothioate
  modified_base 23: mod_base = OTHER; note = 2'-O-methyladenosine-3'-phosphate
  misc_feature 1..4: note = RNA
  misc_feature 5: note = DNA
  misc_feature 6..23: note = RNA
taatttcattaatcaccacgtaa

SEQ ID NO: 1449 - DNA, 23 bp, synthetic construct
  source 1..23: mol_type = other DNA
atggcggtaaccctgcagcctgc

SEQ ID NO: 1450 - DNA, 23 bp, synthetic construct
  source 1..23: mol_type = other DNA
ccgcagagacagagtgacccagc

SEQ ID NO: 1451 - DNA, 23 bp, synthetic construct
  source 1..23: mol_type = other DNA
agagacagagtgacccagcaacc

SEQ ID NO: 1452 - DNA, 23 bp, synthetic construct
  source 1..23: mol_type = other DNA
gacagagtgacccagcaacccag

SEQ ID NO: 1453 - DNA, 23 bp, synthetic construct
  source 1..23: mol_type = other DNA
acagagtgacccagcaacccaga

SEQ ID NO: 1454 - DNA, 23 bp, synthetic construct
  source 1..23: mol_type = other DNA
ccagcaacccagagcccatgagg

SEQ ID NO: 1455 - DNA, 23 bp, synthetic construct
  source 1..23: mol_type = other DNA
cagcaacccagagcccatgaggg

SEQ ID NO: 1456 - DNA, 23 bp, synthetic construct
  source 1..23: mol_type = other DNA
agcaacccagagcccatgaggga

SEQ ID NO: 1457 - DNA, 23 bp, synthetic construct
  source 1..23: mol_type = other DNA
caacccagagcccatgagggaca

SEQ ID NO: 1458 - DNA, 23 bp, synthetic construct
  source 1..23: mol_type = other DNA
cccgctccctcacttgggtcttc

SEQ ID NO: 1459 - DNA, 23 bp, synthetic construct
  source 1..23: mol_type = other DNA
cgctccctcacttgggtcttccc

SEQ ID NO: 1460 - DNA, 23 bp, synthetic construct
  source 1..23: mol_type = other DNA
ctccctcacttgggtcttccctt

SEQ ID NO: 1461 - DNA, 23 bp, synthetic construct
  source 1..23: mol_type = other DNA
tccctcacttgggtcttcccttg

SEQ ID NO: 1462 - DNA, 23 bp, synthetic construct
  source 1..23: mol_type = other DNA
ctcacttgggtcttcccttgtcc

SEQ ID NO: 1463 - DNA, 23 bp, synthetic construct
  source 1..23: mol_type = other DNA
tcacttgggtcttcccttgtcct

SEQ ID NO: 1464 - DNA, 23 bp, synthetic construct
  source 1..23: mol_type = other DNA
cacttgggtcttcccttgtcctc

SEQ ID NO: 1465 - DNA, 23 bp, synthetic construct
  source 1..23: mol_type = other DNA
cttgggtcttcccttgtcctctc

SEQ ID NO: 1466 - DNA, 23 bp, synthetic construct
  source 1..23: mol_type = other DNA
gggtcttcccttgtcctctcgcg

SEQ ID NO: 1467 - DNA, 23 bp, synthetic construct
  source 1..23: mol_type = other DNA
ggtcttcccttgtcctctcgcga

SEQ ID NO: 1468 - DNA, 23 bp, synthetic construct
  source 1..23: mol_type = other DNA
gtcttcccttgtcctctcgcgag

SEQ ID NO: 1469 - DNA, 23 bp, synthetic construct
  source 1..23: mol_type = other DNA
tcttcccttgtcctctcgcgagg

SEQ ID NO: 1470 - DNA, 23 bp, synthetic construct
  source 1..23: mol_type = other DNA
cttcccttgtcctctcgcgaggg

SEQ ID NO: 1471 - DNA, 23 bp, synthetic construct
  source 1..23: mol_type = other DNA
ttcccttgtcctctcgcgagggg

SEQ ID NO: 1472 - DNA, 23 bp, synthetic construct
  source 1..23: mol_type = other DNA
ggcctgtcctgaattcaccgagg

SEQ ID NO: 1473 - DNA, 23 bp, synthetic construct
  source 1..23: mol_type = other DNA
gcctgtcctgaattcaccgaggg

SEQ ID NO: 1474 - DNA, 23 bp, synthetic construct
  source 1..23: mol_type = other DNA
cctgtcctgaattcaccgagggg

SEQ ID NO: 1475 - DNA, 23 bp, synthetic construct
  source 1..23: mol_type = other DNA
tctcgcccttcgcaggatgcgaa

SEQ ID NO: 1476 - DNA, 23 bp, synthetic construct
  source 1..23: mol_type = other DNA
ctcgcccttcgcaggatgcgaag

SEQ ID NO: 1477 - DNA, 23 bp, synthetic construct
  source 1..23: mol_type = other DNA
tcgcccttcgcaggatgcgaaga

SEQ ID NO: 1478 - DNA, 23 bp, synthetic construct
  source 1..23: mol_type = other DNA
gcccttcgcaggatgcgaagagt

SEQ ID NO: 1479 - DNA, 23 bp, synthetic construct
  source 1..23: mol_type = other DNA
cccttcgcaggatgcgaagagtt

SEQ ID NO: 1480 - DNA, 23 bp, synthetic construct
  source 1..23: mol_type = other DNA
ccttcgcaggatgcgaagagttg

SEQ ID NO: 1481 - DNA, 23 bp, synthetic construct
  source 1..23: mol_type = other DNA
cttcgcaggatgcgaagagttgg

SEQ ID NO: 1482 - DNA, 23 bp, synthetic construct
  source 1..23: mol_type = other DNA
ttcgcaggatgcgaagagttggg

SEQ ID NO: 1483 - DNA, 23 bp, synthetic construct
  source 1..23: mol_type = other DNA
tcgcaggatgcgaagagttgggg

SEQ ID NO: 1484 - DNA, 23 bp, synthetic construct
  source 1..23: mol_type = other DNA
ttatttgcgagaaaccagggcgg

SEQ ID NO: 1485 - DNA, 23 bp, synthetic construct
  source 1..23: mol_type = other DNA
tatttgcgagaaaccagggcggg

SEQ ID NO: 1486 - DNA, 23 bp, synthetic construct
  source 1..23: mol_type = other DNA
atttgcgagaaaccagggcgggg

SEQ ID NO: 1487 - DNA, 23 bp, synthetic construct
  source 1..23: mol_type = other DNA
tttaactgcgttgtgaagagaac

SEQ ID NO: 1488 - DNA, 23 bp, synthetic construct
  source 1..23: mol_type = other DNA
taactgcgttgtgaagagaactt

SEQ ID NO: 1489 - DNA, 23 bp, synthetic construct
  source 1..23: mol_type = other DNA
actgcgttgtgaagagaacttgg

SEQ ID NO: 1490 - DNA, 23 bp, synthetic construct
  source 1..23: mol_type = other DNA
ctgcgttgtgaagagaacttgga

SEQ ID NO: 1491 - DNA, 23 bp, synthetic construct
  source 1..23: mol_type = other DNA
gcgttgtgaagagaacttggagg

SEQ ID NO: 1492 - DNA, 23 bp, synthetic construct
  source 1..23: mol_type = other DNA
ttgtgaagagaacttggaggagc

SEQ ID NO: 1493 - DNA, 23 bp, synthetic construct
  source 1..23: mol_type = other DNA
tgtgaagagaacttggaggagcc

SEQ ID NO: 1494 - DNA, 23 bp, synthetic construct
  source 1..23: mol_type = other DNA
gaagagaacttggaggagccgag

SEQ ID NO: 1495 - DNA, 23 bp, synthetic construct
  source 1..23: mol_type = other DNA
aagagaacttggaggagccgaga

SEQ ID NO: 1496 - DNA, 23 bp, synthetic construct
  source 1..23: mol_type = other DNA
aacttggaggagccgagatttgc

SEQ ID NO: 1497 - DNA, 23 bp, synthetic construct
  source 1..23: mol_type = other DNA
acttggaggagccgagatttgct

SEQ ID NO: 1498 - DNA, 23 bp, synthetic construct
  source 1..23: mol_type = other DNA
cttggaggagccgagatttgctc

SEQ ID NO: 1499 - DNA, 23 bp, synthetic construct
  source 1..23: mol_type = other DNA
ttggaggagccgagatttgctca

SEQ ID NO: 1500 - DNA, 23 bp, synthetic construct
  source 1..23: mol_type = other DNA
tggaggagccgagatttgctcag

SEQ ID NO: 1501 - DNA, 23 bp, synthetic construct
  source 1..23: mol_type = other DNA
aggagccgagatttgctcagtgc

SEQ ID NO: 1502 - DNA, 23 bp, synthetic construct
  source 1..23: mol_type = other DNA
gagccgagatttgctcagtgcca

SEQ ID NO: 1503 - DNA, 23 bp, synthetic construct
  source 1..23: mol_type = other DNA
gccgagatttgctcagtgccact

SEQ ID NO: 1504 - DNA, 23 bp, synthetic construct
  source 1..23: mol_type = other DNA
agatttgctcagtgccacttccc

SEQ ID NO: 1505 - DNA, 23 bp, synthetic construct
  source 1..23: mol_type = other DNA
atttgctcagtgccacttccctc

SEQ ID NO: 1506 - DNA, 23 bp, synthetic construct
  source 1..23: mol_type = other DNA
tttgctcagtgccacttccctct

SEQ ID NO: 1507 - DNA, 23 bp, synthetic construct
  source 1..23: mol_type = other DNA
tcagtgccacttccctcttctag

SEQ ID NO: 1508 - DNA, 23 bp, synthetic construct
  source 1..23: mol_type = other DNA
gtgccacttccctcttctagtct

SEQ ID NO: 1509 - DNA, 23 bp, synthetic construct
  source 1..23: mol_type = other DNA
tgccacttccctcttctagtctg

SEQ ID NO: 1510 - DNA, 23 bp, synthetic construct
  source 1..23: mol_type = other DNA
gccacttccctcttctagtctga

SEQ ID NO: 1511 - DNA, 23 bp, synthetic construct
  source 1..23: mol_type = other DNA
ccacttccctcttctagtctgag

SEQ ID NO: 1512 - DNA, 23 bp, synthetic construct
  source 1..23: mol_type = other DNA
cacttccctcttctagtctgaga

SEQ ID NO: 1513 - DNA, 23 bp, synthetic construct
  source 1..23: mol_type = other DNA
cttccctcttctagtctgagagg

SEQ ID NO: 1514 - DNA, 23 bp, synthetic construct
  source 1..23: mol_type = other DNA
tccctcttctagtctgagaggga

SEQ ID NO: 1515 - DNA, 23 bp, synthetic construct
  source 1..23: mol_type = other DNA
cctcttctagtctgagagggaag

SEQ ID NO: 1516 - DNA, 23 bp, synthetic construct
  source 1..23: mol_type = other DNA
ctcttctagtctgagagggaaga

SEQ ID NO: 1517 - DNA, 23 bp, synthetic construct
  source 1..23: mol_type = other DNA
cttctagtctgagagggaagagg

SEQ ID NO: 1518 - DNA, 23 bp, synthetic construct
  source 1..23: mol_type = other DNA
ttctagtctgagagggaagaggg

SEQ ID NO: 1519 - DNA, 23 bp, synthetic construct
  source 1..23: mol_type = other DNA
tctagtctgagagggaagagggc

SEQ ID NO: 1520 - DNA, 23 bp, synthetic construct
  source 1..23: mol_type = other DNA
tagtctgagagggaagagggctg

SEQ ID NO: 1521 - DNA, 23 bp, synthetic construct
  source 1..23: mol_type = other DNA
agtctgagagggaagagggctgg

SEQ ID NO: 1522 - DNA, 23 bp, synthetic construct
  source 1..23: mol_type = other DNA
gtctgagagggaagagggctggg

SEQ ID NO: 1523 - DNA, 23 bp, synthetic construct
  source 1..23: mol_type = other DNA
ggtttggagctggagagatgtgg

SEQ ID NO: 1524 - DNA, 23 bp, synthetic construct
  source 1..23: mol_type = other DNA
gtttggagctggagagatgtggg

SEQ ID NO: 1525 - DNA, 23 bp, synthetic construct
  source 1..23: mol_type = other DNA
gggcagtggatgacataatgctt

SEQ ID NO: 1526 - DNA, 23 bp, synthetic construct
  source 1..23: mol_type = other DNA
ggcagtggatgacataatgcttt

SEQ ID NO: 1527 - DNA, 23 bp, synthetic construct
  source 1..23: mol_type = other DNA
tttaggacgcctcggcgggagtg

SEQ ID NO: 1528 - DNA, 23 bp, synthetic construct
  source 1..23: mol_type = other DNA
agtgagggcgcgtccaatgggag

SEQ ID NO: 1529 - DNA, 23 bp, synthetic construct
  source 1..23: mol_type = other DNA
gcgcgtccaatgggagatttctt

SEQ ID NO: 1530 - DNA, 23 bp, synthetic construct
  source 1..23: mol_type = other DNA
cgcgtccaatgggagatttcttt

SEQ ID NO: 1531 - DNA, 23 bp, synthetic construct
  source 1..23: mol_type = other DNA
aacagcctgagatttgaggctct

SEQ ID NO: 1532 - DNA, 23 bp, synthetic construct
  source 1..23: mol_type = other DNA
gcctgagatttgaggctcttcct

SEQ ID NO: 1533 - DNA, 23 bp, synthetic construct
  source 1..23: mol_type = other DNA
cctgagatttgaggctcttccta

SEQ ID NO: 1534 - DNA, 23 bp, synthetic construct
  source 1..23: mol_type = other DNA
ctgagatttgaggctcttcctac

SEQ ID NO: 1535 - DNA, 23 bp, synthetic construct
  source 1..23: mol_type = other DNA
tgagatttgaggctcttcctaca

SEQ ID NO: 1536 - DNA, 23 bp, synthetic construct
  source 1..23: mol_type = other DNA
gatttgaggctcttcctacattg

SEQ ID NO: 1537 - DNA, 23 bp, synthetic construct
  source 1..23: mol_type = other DNA
tttgaggctcttcctacattgtc

SEQ ID NO: 1538 - DNA, 23 bp, synthetic construct
  source 1..23: mol_type = other DNA
ttgaggctcttcctacattgtca

SEQ ID NO: 1539 - DNA, 23 bp, synthetic construct
  source 1..23: mol_type = other DNA
tgaggctcttcctacattgtcag

SEQ ID NO: 1540 - DNA, 23 bp, synthetic construct
  source 1..23: mol_type = other DNA
gaggctcttcctacattgtcagg

SEQ ID NO: 1541 - DNA, 23 bp, synthetic construct
  source 1..23: mol_type = other DNA
aggctcttcctacattgtcagga

SEQ ID NO: 1542 - DNA, 23 bp, synthetic construct
  source 1..23: mol_type = other DNA
ggctcttcctacattgtcaggac

SEQ ID NO: 1543 - DNA, 23 bp, synthetic construct
  source 1..23: mol_type = other DNA
ctcttcctacattgtcaggacat

SEQ ID NO: 1544 - DNA, 23 bp, synthetic construct
  source 1..23: mol_type = other DNA
cctacattgtcaggacatttcat

SEQ ID NO: 1545 - DNA, 23 bp, synthetic construct
  source 1..23: mol_type = other DNA
ctacattgtcaggacatttcatt

SEQ ID NO: 1546 - DNA, 23 bp, synthetic construct
  source 1..23: mol_type = other DNA
tacattgtcaggacatttcattt

SEQ ID NO: 1547 - DNA, 23 bp, synthetic construct
  source 1..23: mol_type = other DNA
cattgtcaggacatttcatttag

SEQ ID NO: 1548 - DNA, 23 bp, synthetic construct
  source 1..23: mol_type = other DNA
tgtcaggacatttcatttagttc

SEQ ID NO: 1549 - DNA, 23 bp, synthetic construct
  source 1..23: mol_type = other DNA
gtcaggacatttcatttagttca

SEQ ID NO: 1550 - DNA, 23 bp, synthetic construct
  source 1..23: mol_type = other DNA
tcaggacatttcatttagttcat

SEQ ID NO: 1551 - DNA, 23 bp, synthetic construct
  source 1..23: mol_type = other DNA
caggacatttcatttagttcatg

SEQ ID NO: 1552 - DNA, 23 bp, synthetic construct
  source 1..23: mol_type = other DNA
ggacatttcatttagttcatgat

SEQ ID NO: 1553 - DNA, 23 bp, synthetic construct
  source 1..23: mol_type = other DNA
catttcatttagttcatgatcac

SEQ ID NO: 1554 - DNA, 23 bp, synthetic construct
  source 1..23: mol_type = other DNA
tttcatttagttcatgatcacgg

SEQ ID NO: 1555 - DNA, 23 bp, synthetic construct
  source 1..23: mol_type = other DNA
ttcatttagttcatgatcacggt

SEQ ID NO: 1556 - DNA, 23 bp, synthetic construct
  source 1..23: mol_type = other DNA
tcatttagttcatgatcacggtg

SEQ ID NO: 1557 - DNA, 23 bp, synthetic construct
  source 1..23: mol_type = other DNA
catttagttcatgatcacggtgg

SEQ ID NO: 1558 - DNA, 23 bp, synthetic construct
  source 1..23: mol_type = other DNA
atttagttcatgatcacggtggt

SEQ ID NO: 1559 - DNA, 23 bp, synthetic construct
  source 1..23: mol_type = other DNA
tttagttcatgatcacggtggta

SEQ ID NO: 1560 - DNA, 23 bp, synthetic construct
  source 1..23: mol_type = other DNA
ttagttcatgatcacggtggtag

SEQ ID NO: 1561 - DNA, 23 bp, synthetic construct
  source 1..23: mol_type = other DNA
tagttcatgatcacggtggtagt

SEQ ID NO: 1562 - DNA, 23 bp, synthetic construct
  source 1..23: mol_type = other DNA
ttcatgatcacggtggtagtaac

SEQ ID NO: 1563 - DNA, 23 bp, synthetic construct
  source 1..23: mol_type = other DNA
tcatgatcacggtggtagtaaca

SEQ ID NO: 1564 - DNA, 23 bp, synthetic construct
  source 1..23: mol_type = other DNA
atgatcacggtggtagtaacacg

SEQ ID NO: 1565 - DNA, 23 bp, synthetic construct
  source 1..23: mol_type = other DNA
tgatcacggtggtagtaacacga

SEQ ID NO: 1566 - DNA, 23 bp, synthetic construct
  source 1..23: mol_type = other DNA
gatcacggtggtagtaacacgat

SEQ ID NO: 1567 - DNA, 23 bp, synthetic construct
  source 1..23: mol_type = other DNA
atcacggtggtagtaacacgatt

SEQ ID NO: 1568 - DNA, 23 bp, synthetic construct
  source 1..23: mol_type = other DNA
tcacggtggtagtaacacgattt

SEQ ID NO: 1569 - DNA, 23 bp, synthetic construct
  source 1..23: mol_type = other DNA
aagcaccacctaagagatctgct

SEQ ID NO: 1570 - DNA, 23 bp, synthetic construct
  source 1..23: mol_type = other DNA
agcaccacctaagagatctgctc

SEQ ID NO: 1571 - DNA, 23 bp, synthetic construct
  source 1..23: mol_type = other DNA
caccacctaagagatctgctcat

SEQ ID NO: 1572 - DNA, 23 bp, synthetic construct
  source 1..23: mol_type = other DNA
cacctaagagatctgctcatcta

SEQ ID NO: 1573 - DNA, 23 bp, synthetic construct
  source 1..23: mol_type = other DNA
cctaagagatctgctcatctaag

SEQ ID NO: 1574 - DNA, 23 bp, synthetic construct
  source 1..23: mol_type = other DNA
ctaagagatctgctcatctaagc

SEQ ID NO: 1575 - DNA, 23 bp, synthetic construct
  source 1..23: mol_type = other DNA
taagagatctgctcatctaagcc

SEQ ID NO: 1576 - DNA, 23 bp, synthetic construct
  source 1..23: mol_type = other DNA
aagagatctgctcatctaagcct

SEQ ID NO: 1577 - DNA, 23 bp, synthetic construct
  source 1..23: mol_type = other DNA
agagatctgctcatctaagccta

SEQ ID NO: 1578 - DNA, 23 bp, synthetic construct
  source 1..23: mol_type = other DNA
gagatctgctcatctaagcctaa

SEQ ID NO: 1579 - DNA, 23 bp, synthetic construct
  source 1..23: mol_type = other DNA
atctgctcatctaagcctaagtt

SEQ ID NO: 1580 - DNA, 23 bp, synthetic construct
  source 1..23: mol_type = other DNA
tctgctcatctaagcctaagttg

SEQ ID NO: 1581 - DNA, 23 bp, synthetic construct
  source 1..23: mol_type = other DNA
ctgctcatctaagcctaagttgg

SEQ ID NO: 1582 - DNA, 23 bp, synthetic construct
  source 1..23: mol_type = other DNA
tgctcatctaagcctaagttggt

SEQ ID NO: 1583 - DNA, 23 bp, synthetic construct
  source 1..23: mol_type = other DNA
gctcatctaagcctaagttggtc

SEQ ID NO: 1584 - DNA, 23 bp, synthetic construct
  source 1..23: mol_type = other DNA
ctcatctaagcctaagttggtct

SEQ ID NO: 1585 - DNA, 23 bp, synthetic construct
  source 1..23: mol_type = other DNA
tcatctaagcctaagttggtctg

SEQ ID NO: 1586 - DNA, 23 bp, synthetic construct
  source 1..23: mol_type = other DNA
catctaagcctaagttggtctgc

SEQ ID NO: 1587 - DNA, 23 bp, synthetic construct
  source 1..23: mol_type = other DNA
atctaagcctaagttggtctgca

SEQ ID NO: 1588 - DNA, 23 bp, synthetic construct
  source 1..23: mol_type = other DNA
tctaagcctaagttggtctgcag

SEQ ID NO: 1589 - DNA, 23 bp, synthetic construct
  source 1..23: mol_type = other DNA
taagcctaagttggtctgcaggc

SEQ ID NO: 1590 - DNA, 23 bp, synthetic construct
  source 1..23: mol_type = other DNA
agcctaagttggtctgcaggcgt

SEQ ID NO: 1591 - DNA, 23 bp, synthetic construct
  source 1..23: mol_type = other DNA
gcctaagttggtctgcaggcgtt

SEQ ID NO: 1592 - DNA, 23 bp, synthetic construct
  source 1..23: mol_type = other DNA
cctaagttggtctgcaggcgttt

SEQ ID NO: 1593 - DNA, 23 bp, synthetic construct
  source 1..23: mol_type = other DNA
taagttggtctgcaggcgtttga

SEQ ID NO: 1594 - DNA, 23 bp, synthetic construct
  source 1..23: mol_type = other DNA
gttggtctgcaggcgtttgaatg

SEQ ID NO: 1595 - DNA, 23 bp, synthetic construct
  source 1..23: mol_type = other DNA
ttggtctgcaggcgtttgaatga

SEQ ID NO: 1596 - DNA, 23 bp, synthetic construct
  source 1..23: mol_type = other DNA
ggtctgcaggcgtttgaatgagt

SEQ ID NO: 1597 - DNA, 23 bp, synthetic construct
  source 1..23: mol_type = other DNA
gtctgcaggcgtttgaatgagtt

SEQ ID NO: 1598 - DNA, 23 bp, synthetic construct
  source 1..23: mol_type = other DNA
tctgcaggcgtttgaatgagttg

SEQ ID NO: 1599 - DNA, 23 bp, synthetic construct
  source 1..23: mol_type = other DNA
ctgcaggcgtttgaatgagttgt

SEQ ID NO: 1600 - DNA, 23 bp, synthetic construct
  source 1..23: mol_type = other DNA
tgcaggcgtttgaatgagttgtg

SEQ ID NO: 1601 - DNA, 23 bp, synthetic construct
  source 1..23: mol_type = other DNA
gcaggcgtttgaatgagttgtgg

SEQ ID NO: 1602 - DNA, 23 bp, synthetic construct
  source 1..23: mol_type = other DNA
aggcgtttgaatgagttgtggtt

SEQ ID NO: 1603 - DNA, 23 bp, synthetic construct
  source 1..23: mol_type = other DNA
gcgtttgaatgagttgtggttgc

SEQ ID NO: 1604 - DNA, 23 bp, synthetic construct
  source 1..23: mol_type = other DNA
cgtttgaatgagttgtggttgcc

SEQ ID NO: 1605 - DNA, 23 bp, synthetic construct
  source 1..23: mol_type = other DNA
gtttgaatgagttgtggttgcca

SEQ ID NO: 1606 - DNA, 23 bp, synthetic construct
  source 1..23: mol_type = other DNA
tttgaatgagttgtggttgccaa

SEQ ID NO: 1607 - DNA, 23 bp, synthetic construct
  source 1..23: mol_type = other DNA
atgagttgtggttgccaagtaaa

SEQ ID NO: 1608 - DNA, 23 bp, synthetic construct
  source 1..23: mol_type = other DNA
tgagttgtggttgccaagtaaag

SEQ ID NO: 1609 - DNA, 23 bp, synthetic construct
  source 1..23: mol_type = other DNA
gagttgtggttgccaagtaaagt

SEQ ID NO: 1610 - DNA, 23 bp, synthetic construct
  source 1..23: mol_type = other DNA
agttgtggttgccaagtaaagtg

SEQ ID NO: 1611 - DNA, 23 bp, synthetic construct
  source 1..23: mol_type = other DNA
tgtggttgccaagtaaagtggtg

SEQ ID NO: 1612 - DNA, 23 bp, synthetic construct
  source 1..23: mol_type = other DNA
gtggttgccaagtaaagtggtga

SEQ ID NO: 1613 - DNA, 23 bp, synthetic construct
  source 1..23: mol_type = other DNA
ttgccaagtaaagtggtgaactt

SEQ ID NO: 1614 - DNA, 23 bp, synthetic construct
  source 1..23: mol_type = other DNA
gccaagtaaagtggtgaacttac

SEQ ID NO: 1615 - DNA, 23 bp, synthetic construct
  source 1..23: mol_type = other DNA
ccaagtaaagtggtgaacttacg

SEQ ID NO: 1616 - DNA, 23 bp, synthetic construct
  source 1..23: mol_type = other DNA
caagtaaagtggtgaacttacgt

SEQ ID NO: 1617 - DNA, 23 bp, synthetic construct
  source 1..23: mol_type = other DNA
aagtaaagtggtgaacttacgtg

SEQ ID NO: 1618 - DNA, 23 bp, synthetic construct
  source 1..23: mol_type = other DNA
agtaaagtggtgaacttacgtgg

SEQ ID NO: 1619 - DNA, 23 bp, synthetic construct
  source 1..23: mol_type = other DNA
gtaaagtggtgaacttacgtggt

SEQ ID NO: 1620 - DNA, 23 bp, synthetic construct
  source 1..23: mol_type = other DNA
taaagtggtgaacttacgtggtg

SEQ ID NO: 1621 - DNA, 23 bp, synthetic construct
  source 1..23: mol_type = other DNA
aaagtggtgaacttacgtggtga

SEQ ID NO: 1622 - DNA, 23 bp, synthetic construct
  source 1..23: mol_type = other DNA
aagtggtgaacttacgtggtgat

SEQ ID NO: 1623 - DNA, 23 bp, synthetic construct
  source 1..23: mol_type = other DNA
tggtgaacttacgtggtgattaa

SEQ ID NO: 1624 - DNA, 23 bp, synthetic construct
  source 1..23: mol_type = other DNA
gtgaacttacgtggtgattaatg

SEQ ID NO: 1625 - DNA, 23 bp, synthetic construct
  source 1..23: mol_type = other DNA
tgaacttacgtggtgattaatga

SEQ ID NO: 1626 - DNA, 23 bp, synthetic construct
  source 1..23: mol_type = other DNA
gaacttacgtggtgattaatgaa

SEQ ID NO: 1627 - DNA, 23 bp, synthetic construct
  source 1..23: mol_type = other DNA
aacttacgtggtgattaatgaaa

SEQ ID NO: 1628 - DNA, 23 bp, synthetic construct
  source 1..23: mol_type = other DNA
acttacgtggtgattaatgaaat

SEQ ID NO: 1629 - DNA, 23 bp, synthetic construct
  source 1..23: mol_type = other DNA
cttacgtggtgattaatgaaatt

SEQ ID NO: 1630 - DNA, 23 bp, synthetic construct
  source 1..23: mol_type = other DNA
cgtggtgattaatgaaattatct

SEQ ID NO: 1631 - DNA, 23 bp, synthetic construct
  source 1..23: mol_type = other DNA
tgagtttgggcccgctgcagctc

SEQ ID NO: 1632 - DNA, 23 bp, synthetic construct
  source 1..23: mol_type = other DNA
gatggcggtaaccctgcagcctg

SEQ ID NO: 1633 - DNA, 23 bp, synthetic construct
  source 1..23: mol_type = other DNA
cgcagagacagagtgacccagca

SEQ ID NO: 1634 - DNA, 23 bp, synthetic construct
  source 1..23: mol_type = other DNA
gcagagacagagtgacccagcaa

SEQ ID NO: 1635 - DNA, 23 bp, synthetic construct
  source 1..23: mol_type = other DNA
cagagacagagtgacccagcaac

SEQ ID NO: 1636 - DNA, 23 bp, synthetic construct
  source 1..23: mol_type = other DNA
gagacagagtgacccagcaaccc

SEQ ID NO: 1637 - DNA, 23 bp, synthetic construct
  source 1..23: mol_type = other DNA
agacagagtgacccagcaaccca

SEQ ID NO: 1638 - DNA, 23 bp, synthetic construct
  source 1..23: mol_type = other DNA
cagagtgacccagcaacccagag

SEQ ID NO: 1639 - DNA, 23 bp, synthetic construct
  source 1..23: mol_type = other DNA
agagtgacccagcaacccagagc

SEQ ID NO: 1640 - DNA, 23 bp, synthetic construct
  source 1..23: mol_type = other DNA
gcaacccagagcccatgagggac

SEQ ID NO: 1641 - DNA, 23 bp, synthetic construct
  source 1..23: mol_type = other DNA
aacccagagcccatgagggacac

SEQ ID NO: 1642 - DNA, 23 bp, synthetic construct
  source 1..23: mol_type = other DNA
acccagagcccatgagggacacc

SEQ ID NO: 1643 - DNA, 23 bp, synthetic construct
  source 1..23: mol_type = other DNA
ccgctccctcacttgggtcttcc

SEQ ID NO: 1644 - DNA, 23 bp, synthetic construct
  source 1..23: mol_type = other DNA
gctccctcacttgggtcttccct

SEQ ID NO: 1645 - DNA, 23 bp, synthetic construct
  source 1..23: mol_type = other DNA
cctcacttgggtcttcccttgtc

SEQ ID NO: 1646 - DNA, 23 bp, synthetic construct
  source 1..23: mol_type = other DNA
acttgggtcttcccttgtcctct

SEQ ID NO: 1647 - DNA, 23 bp, synthetic construct
  source 1..23: mol_type = other DNA
ttgggtcttcccttgtcctctcg

SEQ ID NO: 1648 - DNA, 23 bp, synthetic construct
  source 1..23: mol_type = other DNA
tgggtcttcccttgtcctctcgc

SEQ ID NO: 1649 - DNA, 23 bp, synthetic construct
  source 1..23: mol_type = other DNA
gggcctgtcctgaattcaccgag

SEQ ID NO: 1650 - DNA, 23 bp, synthetic construct
  source 1..23: mol_type = other DNA
cgcccttcgcaggatgcgaagag

SEQ ID NO: 1651 - DNA, 23 bp, synthetic construct
  source 1..23: mol_type = other DNA
tttatttgcgagaaaccagggcg

SEQ ID NO: 1652 - DNA, 23 bp, synthetic construct
  source 1..23: mol_type = other DNA
ttaactgcgttgtgaagagaact

SEQ ID NO: 1653 - DNA, 23 bp, synthetic construct
  source 1..23: mol_type = other DNA
aactgcgttgtgaagagaacttg

SEQ ID NO: 1654 - DNA, 23 bp, synthetic construct
  source 1..23: mol_type = other DNA
tgcgttgtgaagagaacttggag

SEQ ID NO: 1655 - DNA, 23 bp, synthetic construct
  source 1..23: mol_type = other DNA
gtgaagagaacttggaggagccg

SEQ ID NO: 1656 - DNA, 23 bp, synthetic construct
  source 1..23: mol_type = other DNA
tgaagagaacttggaggagccga

SEQ ID NO: 1657 - DNA, 23 bp, synthetic construct
  source 1..23: mol_type = other DNA
agagaacttggaggagccgagat

SEQ ID NO: 1658 - DNA, 23 bp, synthetic construct
  source 1..23: mol_type = other DNA
gagaacttggaggagccgagatt

SEQ ID NO: 1659 - DNA, 23 bp, synthetic construct
  source 1..23: mol_type = other DNA
agaacttggaggagccgagattt

SEQ ID NO: 1660 - DNA, 23 bp, synthetic construct
  source 1..23: mol_type = other DNA
ggaggagccgagatttgctcagt

SEQ ID NO: 1661 - DNA, 23 bp, synthetic construct
  source 1..23: mol_type = other DNA
gaggagccgagatttgctcagtg

SEQ ID NO: 1662 - DNA, 23 bp, synthetic construct
  source 1..23: mol_type = other DNA
ggagccgagatttgctcagtgcc

SEQ ID NO: 1663 - DNA, 23 bp, synthetic construct
  source 1..23: mol_type = other DNA
agccgagatttgctcagtgccac

SEQ ID NO: 1664 - DNA, 23 bp, synthetic construct
  source 1..23: mol_type = other DNA
ccgagatttgctcagtgccactt

SEQ ID NO: 1665 - DNA, 23 bp, synthetic construct
  source 1..23: mol_type = other DNA
cgagatttgctcagtgccacttc

SEQ ID NO: 1666 - DNA, 23 bp, synthetic construct
  source 1..23: mol_type = other DNA
gagatttgctcagtgccacttcc

SEQ ID NO: 1667 - DNA, 23 bp, synthetic construct
  source 1..23: mol_type = other DNA
gatttgctcagtgccacttccct

SEQ ID NO: 1668 - DNA, 23 bp, synthetic construct
  source 1..23: mol_type = other DNA
ttgctcagtgccacttccctctt

SEQ ID NO: 1669 - DNA, 23 bp, synthetic construct
  source 1..23: mol_type = other DNA
tgctcagtgccacttccctcttc

SEQ ID NO: 1670 - DNA, 23 bp, synthetic construct
  source 1..23: mol_type = other DNA
acttccctcttctagtctgagag

SEQ ID NO: 1671 - DNA, 23 bp, synthetic construct
  source 1..23: mol_type = other DNA
ttccctcttctagtctgagaggg

SEQ ID NO: 1672 - DNA, 23 bp, synthetic construct
  source 1..23: mol_type = other DNA
ccctcttctagtctgagagggaa

SEQ ID NO: 1673 - DNA, 23 bp, synthetic construct
  source 1..23: mol_type = other DNA
tcttctagtctgagagggaagag

SEQ ID NO: 1674 - DNA, 23 bp, synthetic construct
  source 1..23: mol_type = other DNA
ctagtctgagagggaagagggct

SEQ ID NO: 1675 - DNA, 23 bp, synthetic construct
  source 1..23: mol_type = other DNA
tgagggcgcgtccaatgggagat

SEQ ID NO: 1676 - DNA, 23 bp, synthetic construct
  source 1..23: mol_type = other DNA
gagggcgcgtccaatgggagatt

SEQ ID NO: 1677 - DNA, 23 bp, synthetic construct
  source 1..23: mol_type = other DNA
agggcgcgtccaatgggagattt

SEQ ID NO: 1678 - DNA, 23 bp, synthetic construct
  source 1..23: mol_type = other DNA
ggcgcgtccaatgggagatttct

SEQ ID NO: 1679 - DNA, 23 bp, synthetic construct
  source 1..23: mol_type = other DNA
aaacagcctgagatttgaggctc

SEQ ID NO: 1680 - DNA, 23 bp, synthetic construct
  source 1..23: mol_type = other DNA
acagcctgagatttgaggctctt

SEQ ID NO: 1681 - DNA, 23 bp, synthetic construct
  source 1..23: mol_type = other DNA
cagcctgagatttgaggctcttc

SEQ ID NO: 1682 - DNA, 23 bp, synthetic construct
  source 1..23: mol_type = other DNA
agcctgagatttgaggctcttcc

SEQ ID NO: 1683 - DNA, 23 bp, synthetic construct
  source 1..23: mol_type = other DNA
gagatttgaggctcttcctacat

SEQ ID NO: 1684 - DNA, 23 bp, synthetic construct
  source 1..23: mol_type = other DNA
agatttgaggctcttcctacatt

SEQ ID NO: 1685 - DNA, 23 bp, synthetic construct
  source 1..23: mol_type = other DNA
gctcttcctacattgtcaggaca

SEQ ID NO: 1686 - DNA, 23 bp, synthetic construct
  source 1..23: mol_type = other DNA
tcttcctacattgtcaggacatt

SEQ ID NO: 1687 - DNA, 23 bp, synthetic construct
  source 1..23: mol_type = other DNA
cttcctacattgtcaggacattt

SEQ ID NO: 1688 - DNA, 23 bp, synthetic construct
  source 1..23: mol_type = other DNA
tcctacattgtcaggacatttca

SEQ ID NO: 1689 - DNA, 23 bp, synthetic construct
  source 1..23: mol_type = other DNA
atttcatttagttcatgatcacg

SEQ ID NO: 1690 - DNA, 23 bp, synthetic construct
  source 1..23: mol_type = other DNA
agttcatgatcacggtggtagta

SEQ ID NO: 1691 - DNA, 23 bp, synthetic construct
  source 1..23: mol_type = other DNA
gttcatgatcacggtggtagtaa

SEQ ID NO: 1692 - DNA, 23 bp, synthetic construct
  source 1..23: mol_type = other DNA
catgatcacggtggtagtaacac

SEQ ID NO: 1693 - DNA, 23 bp, synthetic construct
  source 1..23: mol_type = other DNA
tttaagcaccacctaagagatct

SEQ ID NO: 1694 - DNA, 23 bp, synthetic construct
  source 1..23: mol_type = other DNA
gcaccacctaagagatctgctca

SEQ ID NO: 1695 - DNA, 23 bp, synthetic construct
  source 1..23: mol_type = other DNA
accacctaagagatctgctcatc

SEQ ID NO: 1696 - DNA, 23 bp, synthetic construct
  source 1..23: mol_type = other DNA
ccacctaagagatctgctcatct

SEQ ID NO: 1697 - DNA, 23 bp, synthetic construct
  source 1..23: mol_type = other DNA
acctaagagatctgctcatctaa

SEQ ID NO: 1698 - DNA, 23 bp, synthetic construct
  source 1..23: mol_type = other DNA
agatctgctcatctaagcctaag

SEQ ID NO: 1699 - DNA, 23 bp, synthetic construct
  source 1..23: mol_type = other DNA
ctaagcctaagttggtctgcagg

SEQ ID NO: 1700 - DNA, 23 bp, synthetic construct
  source 1..23: mol_type = other DNA
aagcctaagttggtctgcaggcg

SEQ ID NO: 1701 - DNA, 23 bp, synthetic construct
  source 1..23: mol_type = other DNA
tggtctgcaggcgtttgaatgag

SEQ ID NO: 1702 - DNA, 23 bp, synthetic construct
  source 1..23: mol_type = other DNA
tgaatgagttgtggttgccaagt

SEQ ID NO: 1703 - DNA, 23 bp, synthetic construct
  source 1..23: mol_type = other DNA
gaatgagttgtggttgccaagta

SEQ ID NO: 1704 - DNA, 23 bp, synthetic construct
  source 1..23: mol_type = other DNA
aatgagttgtggttgccaagtaa

SEQ ID NO: 1705 - DNA, 23 bp, synthetic construct
  source 1..23: mol_type = other DNA
ggttgccaagtaaagtggtgaac

SEQ ID NO: 1706 - DNA, 23 bp, synthetic construct
  source 1..23: mol_type = other DNA
gttgccaagtaaagtggtgaact

SEQ ID NO: 1707 - DNA, 23 bp, synthetic construct
  source 1..23: mol_type = other DNA
tgccaagtaaagtggtgaactta

SEQ ID NO: 1708 - DNA, 23 bp, synthetic construct
  source 1..23: mol_type = other DNA
agtggtgaacttacgtggtgatt

SEQ ID NO: 1709 - DNA, 23 bp, synthetic construct
  source 1..23: mol_type = other DNA
ggtgaacttacgtggtgattaat

SEQ ID NO: 1710 - DNA, 23 bp, synthetic construct
  source 1..23: mol_type = other DNA
ttacgtggtgattaatgaaatta

SEQ ID NO: 1711 - RNA, 21 nt, synthetic construct
  source 1..21: mol_type = other RNA
  modified_base 1: mod_base = OTHER; note = 2'-O-methyluridine-3'-phosphorothioate
  modified_base 2: mod_base = OTHER; note = 2'-O-methyladenosine-3'- phosphorothioate
  modified_base 3: mod_base = OTHER; note = 2'-O-methyladenosine-3'-phosphate
  modified_base 4: mod_base = OTHER; note = 2'-O-methyladenosine-3'-phosphate
  modified_base 5: mod_base = OTHER; note = 2'-O-methylguanosine-3'-phosphate
  modified_base 6: mod_base = OTHER; note = 2'-O-hexadecyl-uridine-3'-phosphate
  modified_base 7: mod_base = OTHER; note = 2'-fluoroguanosine-3'-phosphate
  modified_base 8: mod_base = OTHER; note = 2'-O-methylguanosine-3'-phosphate
  modified_base 9: mod_base = OTHER; note = 2'-fluorouridine-3'-phosphate
  modified_base 10: mod_base = OTHER; note = 2'-fluoroguanosine-3'-phosphate
  modified_base 11: mod_base = OTHER; note = 2'-fluoroadenosine-3'-phosphate
  modified_base 12: mod_base = OTHER; note = 2'-O-methyladenosine-3'-phosphate
  modified_base 13: mod_base = OTHER; note = 2'-O-methylcytidine-3'-phosphate
  modified_base 14: mod_base = OTHER; note = 2'-O-methyluridine-3'-phosphate
  modified_base 15: mod_base = OTHER; note = 2'-O-methyluridine-3'-phosphate
  modified_base 16: mod_base = OTHER; note = 2'-O-methyladenosine-3'-phosphate
  modified_base 17: mod_base = OTHER; note = 2'-O-methylcytidine-3'-phosphate
  modified_base 18: mod_base = OTHER; note = 2'-O-methylguanosine-3'-phosphate
  modified_base 19: mod_base = OTHER; note = 2'-O-methyluridine-3'-phosphorothioate
  modified_base 20: mod_base = OTHER; note = 2'-O-methylguanosine-3'- phosphorothioate
  modified_base 21: mod_base = OTHER; note = 2'-O-methyladenosine-3'-phosphate
taaagtggtgaacttacgtga

SEQ ID NO: 1712 - RNA, 21 nt, synthetic construct
  source 1..21: mol_type = other RNA
  modified_base 1: mod_base = OTHER; note = 2'-O-methyluridine-3'-phosphorothioate
  modified_base 2: mod_base = OTHER; note = 2'-O-methyladenosine-3'- phosphorothioate
  modified_base 3: mod_base = OTHER; note = 2'-O-methyladenosine-3'-phosphate
  modified_base 4: mod_base = OTHER; note = 2'-O-methyladenosine-3'-phosphate
  modified_base 5: mod_base = OTHER; note = 2'-O-methylguanosine-3'-phosphate
  modified_base 6: mod_base = OTHER; note = 2'-O-hexadecyl-uridine-3'-phosphate
  modified_base 7: mod_base = OTHER; note = 2'-O-methylguanosine-3'-phosphate
  modified_base 8: mod_base = OTHER; note = 2'-O-methylguanosine-3'-phosphate
  modified_base 9: mod_base = OTHER; note = 2'-fluorouridine-3'-phosphate
  modified_base 10: mod_base = OTHER; note = 2'-fluoroguanosine-3'-phosphate
  modified_base 11: mod_base = OTHER; note = 2'-fluoroadenosine-3'-phosphate
  modified_base 12: mod_base = OTHER; note = 2'-O-methyladenosine-3'-phosphate
  modified_base 13: mod_base = OTHER; note = 2'-O-methylcytidine-3'-phosphate
  modified_base 14: mod_base = OTHER; note = 2'-O-methyluridine-3'-phosphate
  modified_base 15: mod_base = OTHER; note = 2'-O-methyluridine-3'-phosphate
  modified_base 16: mod_base = OTHER; note = 2'-O-methyladenosine-3'-phosphate
  modified_base 17: mod_base = OTHER; note = 2'-O-methylcytidine-3'-phosphate
  modified_base 18: mod_base = OTHER; note = 2'-O-methylguanosine-3'-phosphate
  modified_base 19: mod_base = OTHER; note = 2'-O-methyluridine-3'-phosphorothioate
  modified_base 20: mod_base = OTHER; note = 2'-O-methylguanosine-3'- phosphorothioate
  modified_base 21: mod_base = OTHER; note = 2'-O-methyladenosine-3'-phosphate
taaagtggtgaacttacgtga

SEQ ID NO: 1713 - RNA, 21 nt, synthetic construct
  source 1..21: mol_type = other RNA
  modified_base 1: mod_base = OTHER; note = 2'-O-methyladenosine-3'- phosphorothioate
  modified_base 2: mod_base = OTHER; note = 2'-O-methyladenosine-3'- phosphorothioate
  modified_base 3: mod_base = OTHER; note = 2'-O-methyladenosine-3'-phosphate
  modified_base 4: mod_base = OTHER; note = 2'-O-methylguanosine-3'-phosphate
  modified_base 5: mod_base = OTHER; note = 2'-O-methyluridine-3'-phosphate
  modified_base 6: mod_base = OTHER; note = 2'-O-hexadecyl-guanosine-3'-phosphate
  modified_base 7: mod_base = OTHER; note = 2'-O-methylguanosine-3'-phosphate
  modified_base 8: mod_base = OTHER; note = 2'-O-methyluridine-3'-phosphate
  modified_base 9: mod_base = OTHER; note = 2'-fluoroguanosine-3'-phosphate
  modified_base 10: mod_base = OTHER; note = 2'-fluoroadenosine-3'-phosphate
  modified_base 11: mod_base = OTHER; note = 2'-fluoroadenosine-3'-phosphate
  modified_base 12: mod_base = OTHER; note = 2'-O-methylcytidine-3'-phosphate
  modified_base 13: mod_base = OTHER; note = 2'-O-methyluridine-3'-phosphate
  modified_base 14: mod_base = OTHER; note = 2'-O-methyluridine-3'-phosphate
  modified_base 15: mod_base = OTHER; note = 2'-O-methyladenosine-3'-phosphate
  modified_base 16: mod_base = OTHER; note = 2'-O-methylcytidine-3'-phosphate
  modified_base 17: mod_base = OTHER; note = 2'-O-methylguanosine-3'-phosphate
  modified_base 18: mod_base = OTHER; note = 2'-O-methyluridine-3'-phosphate
  modified_base 19: mod_base = OTHER; note = 2'-O-methylguanosine-3'- phosphorothioate
  modified_base 20: mod_base = OTHER; note = 2'-O-methylguanosine-3'- phosphorothioate
  modified_base 21: mod_base = OTHER; note = 2'-O-methyladenosine-3'-phosphate
aaagtggtgaacttacgtgga

SEQ ID NO: 1714 - RNA, 21 nt, synthetic construct
  source 1..21: mol_type = other RNA
  modified_base 1: mod_base = OTHER; note = 2'-O-methyladenosine-3'- phosphorothioate
  modified_base 2: mod_base = OTHER; note = 2'-O-methyladenosine-3'- phosphorothioate
  modified_base 3: mod_base = OTHER; note = 2'-O-methylcytidine-3'-phosphate
  modified_base 4: mod_base = OTHER; note = 2'-O-methyluridine-3'-phosphate
  modified_base 5: mod_base = OTHER; note = 2'-O-methyluridine-3'-phosphate
  modified_base 6: mod_base = OTHER; note = 2'-O-hexadecyl-adenosine-3'-phosphate
  modified_base 7: mod_base = OTHER; note = 2'-fluorocytidine-3'-phosphate
  modified_base 8: mod_base = OTHER; note = 2'-O-methylguanosine-3'-phosphate
  modified_base 9: mod_base = OTHER; note = 2'-fluorouridine-3'-phosphate
  modified_base 10: mod_base = OTHER; note = 2'-fluoroguanosine-3'-phosphate
  modified_base 11: mod_base = OTHER; note = 2'-fluoroguanosine-3'-phosphate
  modified_base 12: mod_base = OTHER; note = 2'-O-methyluridine-3'-phosphate
  modified_base 13: mod_base = OTHER; note = 2'-O-methylguanosine-3'-phosphate
  modified_base 14: mod_base = OTHER; note = 2'-O-methyladenosine-3'-phosphate
  modified_base 15: mod_base = OTHER; note = 2'-O-methyluridine-3'-phosphate
  modified_base 16: mod_base = OTHER; note = 2'-O-methyluridine-3'-phosphate
  modified_base 17: mod_base = OTHER; note = 2'-O-methyladenosine-3'-phosphate
  modified_base 18: mod_base = OTHER; note = 2'-O-methyladenosine-3'-phosphate
  modified_base 19: mod_base = OTHER; note = 2'-O-methyluridine-3'-phosphorothioate
  modified_base 20: mod_base = OTHER; note = 2'-O-methylguanosine-3'- phosphorothioate
  modified_base 21: mod_base = OTHER; note = 2'-O-methyladenosine-3'-phosphate
aacttacgtggtgattaatga

SEQ ID NO: 1715 - RNA, 21 nt, synthetic construct
  source 1..21: mol_type = other RNA
  modified_base 1: mod_base = OTHER; note = 2'-O-methyladenosine-3'- phosphorothioate
  modified_base 2: mod_base = OTHER; note = 2'-O-methyladenosine-3'- phosphorothioate
  modified_base 3: mod_base = OTHER; note = 2'-O-methylcytidine-3'-phosphate
  modified_base 4: mod_base = OTHER; note = 2'-O-methyluridine-3'-phosphate
  modified_base 5: mod_base = OTHER; note = 2'-O-methyluridine-3'-phosphate
  modified_base 6: mod_base = OTHER; note = 2'-O-hexadecyl-adenosine-3'-phosphate
  modified_base 7: mod_base = OTHER; note = 2'-O-methylcytidine-3'-phosphate
  modified_base 8: mod_base = OTHER; note = 2'-O-methylguanosine-3'-phosphate
  modified_base 9: mod_base = OTHER; note = 2'-fluorouridine-3'-phosphate
  modified_base 10: mod_base = OTHER; note = 2'-fluoroguanosine-3'-phosphate
  modified_base 11: mod_base = OTHER; note = 2'-fluoroguanosine-3'-phosphate
  modified_base 12: mod_base = OTHER; note = 2'-O-methyluridine-3'-phosphate
  modified_base 13: mod_base = OTHER; note = 2'-O-methylguanosine-3'-phosphate
  modified_base 14: mod_base = OTHER; note = 2'-O-methyladenosine-3'-phosphate
  modified_base 15: mod_base = OTHER; note = 2'-O-methyluridine-3'-phosphate
  modified_base 16: mod_base = OTHER; note = 2'-O-methyluridine-3'-phosphate
  modified_base 17: mod_base = OTHER; note = 2'-O-methyladenosine-3'-phosphate
  modified_base 18: mod_base = OTHER; note = 2'-O-methyladenosine-3'-phosphate
  modified_base 19: mod_base = OTHER; note = 2'-O-methyluridine-3'-phosphorothioate
  modified_base 20: mod_base = OTHER; note = 2'-O-methylguanosine-3'- phosphorothioate
  modified_base 21: mod_base = OTHER; note = 2'-O-methyladenosine-3'-phosphate
aacttacgtggtgattaatga

SEQ ID NO: 1716 - RNA, 21 nt, synthetic construct
  source 1..21: mol_type = other RNA
  modified_base 1: mod_base = OTHER; note = 2'-O-methylcytidine-3'- phosphorothioate
  modified_base 2: mod_base = OTHER; note = 2'-O-methyladenosine-3'- phosphorothioate
  modified_base 3: mod_base = OTHER; note = 2'-O-methylguanosine-3'-phosphate
  modified_base 4: mod_base = OTHER; note = 2'-O-methylguanosine-3'-phosphate
  modified_base 5: mod_base = OTHER; note = 2'-O-methyladenosine-3'-phosphate
  modified_base 6: mod_base = OTHER; note = 2'-O-hexadecyl-cytidine-3'-phosphate
  modified_base 7: mod_base = OTHER; note = 2'-O-methyladenosine-3'-phosphate
  modified_base 8: mod_base = OTHER; note = 2'-O-methyluridine-3'-phosphate
  modified_base 9: mod_base = OTHER; note = 2'-fluorouridine-3'-phosphate
  modified_base 10: mod_base = OTHER; note = 2'-fluorouridine-3'-phosphate
  modified_base 11: mod_base = OTHER; note = 2'-fluorocytidine-3'-phosphate
  modified_base 12: mod_base = OTHER; note = 2'-O-methyladenosine-3'-phosphate
  modified_base 13: mod_base = OTHER; note = 2'-O-methyluridine-3'-phosphate
  modified_base 14: mod_base = OTHER; note = 2'-O-methyluridine-3'-phosphate
  modified_base 15: mod_base = OTHER; note = 2'-O-methyluridine-3'-phosphate
  modified_base 16: mod_base = OTHER; note = 2'-O-methyladenosine-3'-phosphate
  modified_base 17: mod_base = OTHER; note = 2'-O-methylguanosine-3'-phosphate
  modified_base 18: mod_base = OTHER; note = 2'-O-methyluridine-3'-phosphate
  modified_base 19: mod_base = OTHER; note = 2'-O-methyluridine-3'-phosphorothioate
  modified_base 20: mod_base = OTHER; note = 2'-O-methylcytidine-3'- phosphorothioate
  modified_base 21: mod_base = OTHER; note = 2'-O-methyladenosine-3'-phosphate
caggacatttcatttagttca

SEQ ID NO: 1717 - RNA, 21 nt, synthetic construct
  source 1..21: mol_type = other RNA
  modified_base 1: mod_base = OTHER; note = 2'-O-methylcytidine-3'- phosphorothioate
  modified_base 2: mod_base = OTHER; note = 2'-O-methyladenosine-3'- phosphorothioate
  modified_base 3: mod_base = OTHER; note = 2'-O-methylguanosine-3'-phosphate
  modified_base 4: mod_base = OTHER; note = 2'-O-methylguanosine-3'-phosphate
  modified_base 5: mod_base = OTHER; note = 2'-O-methyladenosine-3'-phosphate
  modified_base 6: mod_base = OTHER; note = 2'-O-hexadecyl-cytidine-3'-phosphate
  modified_base 7: mod_base = OTHER; note = 2'-fluoroadenosine-3'-phosphate
  modified_base 8: mod_base = OTHER; note = 2'-O-methyluridine-3'-phosphate
  modified_base 9: mod_base = OTHER; note = 2'-fluorouridine-3'-phosphate
  modified_base 10: mod_base = OTHER; note = 2'-fluorouridine-3'-phosphate
  modified_base 11: mod_base = OTHER; note = 2'-fluorocytidine-3'-phosphate
  modified_base 12: mod_base = OTHER; note = 2'-O-methyladenosine-3'-phosphate
  modified_base 13: mod_base = OTHER; note = 2'-O-methyluridine-3'-phosphate
  modified_base 14: mod_base = OTHER; note = 2'-O-methyluridine-3'-phosphate
  modified_base 15: mod_base = OTHER; note = 2'-O-methyluridine-3'-phosphate
  modified_base 16: mod_base = OTHER; note = 2'-O-methyladenosine-3'-phosphate
  modified_base 17: mod_base = OTHER; note = 2'-O-methylguanosine-3'-phosphate
  modified_base 18: mod_base = OTHER; note = 2'-O-methyluridine-3'-phosphate
  modified_base 19: mod_base = OTHER; note = 2'-O-methyluridine-3'-phosphorothioate
  modified_base 20: mod_base = OTHER; note = 2'-O-methylcytidine-3'- phosphorothioate
  modified_base 21: mod_base = OTHER; note = 2'-O-methyladenosine-3'-phosphate
caggacatttcatttagttca

SEQ ID NO: 1718 - RNA, 21 nt, synthetic construct
  source 1..21: mol_type = other RNA
  modified_base 1: mod_base = OTHER; note = 2'-O-methylcytidine-3'- phosphorothioate
  modified_base 2: mod_base = OTHER; note = 2'-O-methyladenosine-3'- phosphorothioate
  modified_base 3: mod_base = OTHER; note = 2'-O-methyluridine-3'-phosphate
  modified_base 4: mod_base = OTHER; note = 2'-O-methyluridine-3'-phosphate
  modified_base 5: mod_base = OTHER; note = 2'-O-methylguanosine-3'-phosphate
  modified_base 6: mod_base = OTHER; note = 2'-O-hexadecyl-uridine-3'-phosphate
  modified_base 7: mod_base = OTHER; note = 2'-fluorocytidine-3'-phosphate
  modified_base 8: mod_base = OTHER; note = 2'-O-methyladenosine-3'-phosphate
  modified_base 9: mod_base = OTHER; note = 2'-fluoroguanosine-3'-phosphate
  modified_base 10: mod_base = OTHER; note = 2'-fluoroguanosine-3'-phosphate
  modified_base 11: mod_base = OTHER; note = 2'-fluoroadenosine-3'-phosphate
  modified_base 12: mod_base = OTHER; note = 2'-O-methylcytidine-3'-phosphate
  modified_base 13: mod_base = OTHER; note = 2'-O-methyladenosine-3'-phosphate
  modified_base 14: mod_base = OTHER; note = 2'-O-methyluridine-3'-phosphate
  modified_base 15: mod_base = OTHER; note = 2'-O-methyluridine-3'-phosphate
  modified_base 16: mod_base = OTHER; note = 2'-O-methyluridine-3'-phosphate
  modified_base 17: mod_base = OTHER; note = 2'-O-methylcytidine-3'-phosphate
  modified_base 18: mod_base = OTHER; note = 2'-O-methyladenosine-3'-phosphate
  modified_base 19: mod_base = OTHER; note = 2'-O-methyluridine-3'-phosphorothioate
  modified_base 20: mod_base = OTHER; note = 2'-O-methyluridine-3'-phosphorothioate
  modified_base 21: mod_base = OTHER; note = 2'-O-methyladenosine-3'-phosphate
cattgtcaggacatttcatta

SEQ ID NO: 1719 - RNA, 21 nt, synthetic construct
  source 1..21: mol_type = other RNA
  modified_base 1: mod_base = OTHER; note = 2'-O-methyladenosine-3'- phosphorothioate
  modified_base 2: mod_base = OTHER; note = 2'-O-methylcytidine-3'- phosphorothioate
  modified_base 3: mod_base = OTHER; note = 2'-O-methyluridine-3'-phosphate
  modified_base 4: mod_base = OTHER; note = 2'-O-methyluridine-3'-phosphate
  modified_base 5: mod_base = OTHER; note = 2'-O-methyladenosine-3'-phosphate
  modified_base 6: mod_base = OTHER; note = 2'-O-hexadecyl-cytidine-3'-phosphate
  modified_base 7: mod_base = OTHER; note = 2'-O-methylguanosine-3'-phosphate
  modified_base 8: mod_base = OTHER; note = 2'-O-methyluridine-3'-phosphate
  modified_base 9: mod_base = OTHER; note = 2'-fluoroguanosine-3'-phosphate
  modified_base 10: mod_base = OTHER; note = 2'-fluoroguanosine-3'-phosphate
  modified_base 11: mod_base = OTHER; note = 2'-fluorouridine-3'-phosphate
  modified_base 12: mod_base = OTHER; note = 2'-O-methylguanosine-3'-phosphate
  modified_base 13: mod_base = OTHER; note = 2'-O-methyladenosine-3'-phosphate
  modified_base 14: mod_base = OTHER; note = 2'-O-methyluridine-3'-phosphate
  modified_base 15: mod_base = OTHER; note = 2'-O-methyluridine-3'-phosphate
  modified_base 16: mod_base = OTHER; note = 2'-O-methyladenosine-3'-phosphate
  modified_base 17: mod_base = OTHER; note = 2'-O-methyladenosine-3'-phosphate
  modified_base 18: mod_base = OTHER; note = 2'-O-methyluridine-3'-phosphate
  modified_base 19: mod_base = OTHER; note = 2'-O-methylguanosine-3'- phosphorothioate
  modified_base 20: mod_base = OTHER; note = 2'-O-methyladenosine-3'- phosphorothioate
  modified_base 21: mod_base = OTHER; note = 2'-O-methyladenosine-3'-phosphate
acttacgtggtgattaatgaa

SEQ ID NO: 1720 - RNA, 21 nt, synthetic construct
  source 1..21: mol_type = other RNA
  modified_base 1: mod_base = OTHER; note = 2'-O-methyladenosine-3'- phosphorothioate
  modified_base 2: mod_base = OTHER; note = 2'-O-methyladenosine-3'- phosphorothioate
  modified_base 3: mod_base = OTHER; note = 2'-O-methylguanosine-3'-phosphate
  modified_base 4: mod_base = OTHER; note = 2'-O-methyluridine-3'-phosphate
  modified_base 5: mod_base = OTHER; note = 2'-O-methylguanosine-3'-phosphate
  modified_base 6: mod_base = OTHER; note = 2'-O-hexadecyl-guanosine-3'-phosphate
  modified_base 7: mod_base = OTHER; note = 2'-O-methyluridine-3'-phosphate
  modified_base 8: mod_base = OTHER; note = 2'-O-methylguanosine-3'-phosphate
  modified_base 9: mod_base = OTHER; note = 2'-fluoroadenosine-3'-phosphate
  modified_base 10: mod_base = OTHER; note = 2'-fluoroadenosine-3'-phosphate
  modified_base 11: mod_base = OTHER; note = 2'-fluorocytidine-3'-phosphate
  modified_base 12: mod_base = OTHER; note = 2'-O-methyluridine-3'-phosphate
  modified_base 13: mod_base = OTHER; note = 2'-O-methyluridine-3'-phosphate
  modified_base 14: mod_base = OTHER; note = 2'-O-methyladenosine-3'-phosphate
  modified_base 15: mod_base = OTHER; note = 2'-O-methylcytidine-3'-phosphate
  modified_base 16: mod_base = OTHER; note = 2'-O-methylguanosine-3'-phosphate
  modified_base 17: mod_base = OTHER; note = 2'-O-methyluridine-3'-phosphate
  modified_base 18: mod_base = OTHER; note = 2'-O-methylguanosine-3'-phosphate
  modified_base 19: mod_base = OTHER; note = 2'-O-methylguanosine-3'- phosphorothioate
  modified_base 20: mod_base = OTHER; note = 2'-O-methyluridine-3'-phosphorothioate
  modified_base 21: mod_base = OTHER; note = 2'-O-methyladenosine-3'-phosphate
aagtggtgaacttacgtggta

SEQ ID NO: 1721 - RNA, 21 nt, synthetic construct
  source 1..21: mol_type = other RNA
  modified_base 1: mod_base = OTHER; note = 2'-O-methylguanosine-3'- phosphorothioate
  modified_base 2: mod_base = OTHER; note = 2'-O-methylcytidine-3'- phosphorothioate
  modified_base 3: mod_base = OTHER; note = 2'-O-methyladenosine-3'-phosphate
  modified_base 4: mod_base = OTHER; note = 2'-O-methylguanosine-3'-phosphate
  modified_base 5: mod_base = OTHER; note = 2'-O-methyluridine-3'-phosphate
  modified_base 6: mod_base = OTHER; note = 2'-O-hexadecyl-guanosine-3'-phosphate
  modified_base 7: mod_base = OTHER; note = 2'-O-methylguanosine-3'-phosphate
  modified_base 8: mod_base = OTHER; note = 2'-O-methyladenosine-3'-phosphate
  modified_base 9: mod_base = OTHER; note = 2'-fluorouridine-3'-phosphate
  modified_base 10: mod_base = OTHER; note = 2'-fluoroguanosine-3'-phosphate
  modified_base 11: mod_base = OTHER; note = 2'-fluoroadenosine-3'-phosphate
  modified_base 12: mod_base = OTHER; note = 2'-O-methylcytidine-3'-phosphate
  modified_base 13: mod_base = OTHER; note = 2'-O-methyladenosine-3'-phosphate
  modified_base 14: mod_base = OTHER; note = 2'-O-methyluridine-3'-phosphate
  modified_base 15: mod_base = OTHER; note = 2'-O-methyladenosine-3'-phosphate
  modified_base 16: mod_base = OTHER; note = 2'-O-methyladenosine-3'-phosphate
  modified_base 17: mod_base = OTHER; note = 2'-O-methyluridine-3'-phosphate
  modified_base 18: mod_base = OTHER; note = 2'-O-methylguanosine-3'-phosphate
  modified_base 19: mod_base = OTHER; note = 2'-O-methylcytidine-3'- phosphorothioate
  modified_base 20: mod_base = OTHER; note = 2'-O-methyluridine-3'-phosphorothioate
  modified_base 21: mod_base = OTHER; note = 2'-O-methyladenosine-3'-phosphate
gcagtggatgacataatgcta

SEQ ID NO: 1722 - RNA, 21 nt, synthetic construct
  source 1..21: mol_type = other RNA
  modified_base 1: mod_base = OTHER; note = 2'-O-methylguanosine-3'- phosphorothioate
  modified_base 2: mod_base = OTHER; note = 2'-O-methylcytidine-3'- phosphorothioate
  modified_base 3: mod_base = OTHER; note = 2'-O-methyladenosine-3'-phosphate
  modified_base 4: mod_base = OTHER; note = 2'-O-methylguanosine-3'-phosphate
  modified_base 5: mod_base = OTHER; note = 2'-O-methyluridine-3'-phosphate
  modified_base 6: mod_base = OTHER; note = 2'-O-hexadecyl-guanosine-3'-phosphate
  modified_base 7: mod_base = OTHER; note = 2'-fluoroguanosine-3'-phosphate
  modified_base 8: mod_base = OTHER; note = 2'-O-methyladenosine-3'-phosphate
  modified_base 9: mod_base = OTHER; note = 2'-fluorouridine-3'-phosphate
  modified_base 10: mod_base = OTHER; note = 2'-fluoroguanosine-3'-phosphate
  modified_base 11: mod_base = OTHER; note = 2'-fluoroadenosine-3'-phosphate
  modified_base 12: mod_base = OTHER; note = 2'-O-methylcytidine-3'-phosphate
  modified_base 13: mod_base = OTHER; note = 2'-O-methyladenosine-3'-phosphate
  modified_base 14: mod_base = OTHER; note = 2'-O-methyluridine-3'-phosphate
  modified_base 15: mod_base = OTHER; note = 2'-O-methyladenosine-3'-phosphate
  modified_base 16: mod_base = OTHER; note = 2'-O-methyladenosine-3'-phosphate
  modified_base 17: mod_base = OTHER; note = 2'-O-methyluridine-3'-phosphate
  modified_base 18: mod_base = OTHER; note = 2'-O-methylguanosine-3'-phosphate
  modified_base 19: mod_base = OTHER; note = 2'-O-methylcytidine-3'- phosphorothioate
  modified_base 20: mod_base = OTHER; note = 2'-O-methyluridine-3'-phosphorothioate
  modified_base 21: mod_base = OTHER; note = 2'-O-methyladenosine-3'-phosphate
gcagtggatgacataatgcta

SEQ ID NO: 1723 - RNA, 21 nt, synthetic construct
  source 1..21: mol_type = other RNA
  modified_base 1: mod_base = OTHER; note = 2'-O-methyladenosine-3'- phosphorothioate
  modified_base 2: mod_base = OTHER; note = 2'-O-methyluridine-3'-phosphorothioate
  modified_base 3: mod_base = OTHER; note = 2'-O-methyluridine-3'-phosphate
  modified_base 4: mod_base = OTHER; note = 2'-O-methyluridine-3'-phosphate
  modified_base 5: mod_base = OTHER; note = 2'-O-methyladenosine-3'-phosphate
  modified_base 6: mod_base = OTHER; note = 2'-O-hexadecyl-guanosine-3'-phosphate
  modified_base 7: mod_base = OTHER; note = 2'-O-methyluridine-3'-phosphate
  modified_base 8: mod_base = OTHER; note = 2'-O-methyluridine-3'-phosphate
  modified_base 9: mod_base = OTHER; note = 2'-fluorocytidine-3'-phosphate
  modified_base 10: mod_base = OTHER; note = 2'-fluoroadenosine-3'-phosphate
  modified_base 11: mod_base = OTHER; note = 2'-fluorouridine-3'-phosphate
  modified_base 12: mod_base = OTHER; note = 2'-O-methylguanosine-3'-phosphate
  modified_base 13: mod_base = OTHER; note = 2'-O-methyladenosine-3'-phosphate
  modified_base 14: mod_base = OTHER; note = 2'-O-methyluridine-3'-phosphate
  modified_base 15: mod_base = OTHER; note = 2'-O-methylcytidine-3'-phosphate
  modified_base 16: mod_base = OTHER; note = 2'-O-methyladenosine-3'-phosphate
  modified_base 17: mod_base = OTHER; note = 2'-O-methylcytidine-3'-phosphate
  modified_base 18: mod_base = OTHER; note = 2'-O-methylguanosine-3'-phosphate
  modified_base 19: mod_base = OTHER; note = 2'-O-methylguanosine-3'- phosphorothioate
  modified_base 20: mod_base = OTHER; note = 2'-O-methyluridine-3'-phosphorothioate
  modified_base 21: mod_base = OTHER; note = 2'-O-methyladenosine-3'-phosphate
atttagttcatgatcacggta

SEQ ID NO: 1724 - RNA, 21 nt, synthetic construct
  source 1..21: mol_type = other RNA
  modified_base 1: mod_base = OTHER; note = 2'-O-methyladenosine-3'- phosphorothioate
  modified_base 2: mod_base = OTHER; note = 2'-O-methyluridine-3'-phosphorothioate
  modified_base 3: mod_base = OTHER; note = 2'-O-methyluridine-3'-phosphate
  modified_base 4: mod_base = OTHER; note = 2'-O-methyluridine-3'-phosphate
  modified_base 5: mod_base = OTHER; note = 2'-O-methyladenosine-3'-phosphate
  modified_base 6: mod_base = OTHER; note = 2'-O-hexadecyl-guanosine-3'-phosphate
  modified_base 7: mod_base = OTHER; note = 2'-fluorouridine-3'-phosphate
  modified_base 8: mod_base = OTHER; note = 2'-O-methyluridine-3'-phosphate
  modified_base 9: mod_base = OTHER; note = 2'-fluorocytidine-3'-phosphate
  modified_base 10: mod_base = OTHER; note = 2'-fluoroadenosine-3'-phosphate
  modified_base 11: mod_base = OTHER; note = 2'-fluorouridine-3'-phosphate
  modified_base 12: mod_base = OTHER; note = 2'-O-methylguanosine-3'-phosphate
  modified_base 13: mod_base = OTHER; note = 2'-O-methyladenosine-3'-phosphate
  modified_base 14: mod_base = OTHER; note = 2'-O-methyluridine-3'-phosphate
  modified_base 15: mod_base = OTHER; note = 2'-O-methylcytidine-3'-phosphate
  modified_base 16: mod_base = OTHER; note = 2'-O-methyladenosine-3'-phosphate
  modified_base 17: mod_base = OTHER; note = 2'-O-methylcytidine-3'-phosphate
  modified_base 18: mod_base = OTHER; note = 2'-O-methylguanosine-3'-phosphate
  modified_base 19: mod_base = OTHER; note = 2'-O-methylguanosine-3'- phosphorothioate
  modified_base 20: mod_base = OTHER; note = 2'-O-methyluridine-3'-phosphorothioate
  modified_base 21: mod_base = OTHER; note = 2'-O-methyladenosine-3'-phosphate
atttagttcatgatcacggta

SEQ ID NO: 1725 - RNA, 21 nt, synthetic construct
  source 1..21: mol_type = other RNA
  modified_base 1: mod_base = OTHER; note = 2'-O-methyluridine-3'-phosphorothioate
  modified_base 2: mod_base = OTHER; note = 2'-O-methyladenosine-3'- phosphorothioate
  modified_base 3: mod_base = OTHER; note = 2'-O-methylguanosine-3'-phosphate
  modified_base 4: mod_base = OTHER; note = 2'-O-methyluridine-3'-phosphate
  modified_base 5: mod_base = OTHER; note = 2'-O-methyluridine-3'-phosphate
  modified_base 6: mod_base = OTHER; note = 2'-O-hexadecyl-cytidine-3'-phosphate
  modified_base 7: mod_base = OTHER; note = 2'-O-methyladenosine-3'-phosphate
  modified_base 8: mod_base = OTHER; note = 2'-O-methyluridine-3'-phosphate
  modified_base 9: mod_base = OTHER; note = 2'-fluoroguanosine-3'-phosphate
  modified_base 10: mod_base = OTHER; note = 2'-fluoroadenosine-3'-phosphate
  modified_base 11: mod_base = OTHER; note = 2'-fluorouridine-3'-phosphate
  modified_base 12: mod_base = OTHER; note = 2'-O-methylcytidine-3'-phosphate
  modified_base 13: mod_base = OTHER; note = 2'-O-methyladenosine-3'-phosphate
  modified_base 14: mod_base = OTHER; note = 2'-O-methylcytidine-3'-phosphate
  modified_base 15: mod_base = OTHER; note = 2'-O-methylguanosine-3'-phosphate
  modified_base 16: mod_base = OTHER; note = 2'-O-methylguanosine-3'-phosphate
  modified_base 17: mod_base = OTHER; note = 2'-O-methyluridine-3'-phosphate
  modified_base 18: mod_base = OTHER; note = 2'-O-methylguanosine-3'-phosphate
  modified_base 19: mod_base = OTHER; note = 2'-O-methylguanosine-3'- phosphorothioate
  modified_base 20: mod_base = OTHER; note = 2'-O-methyluridine-3'-phosphorothioate
  modified_base 21: mod_base = OTHER; note = 2'-O-methyladenosine-3'-phosphate
tagttcatgatcacggtggta

SEQ ID NO: 1726 - RNA, 21 nt, synthetic construct
  source 1..21: mol_type = other RNA
  modified_base 1: mod_base = OTHER; note = 2'-O-methylguanosine-3'- phosphorothioate
  modified_base 2: mod_base = OTHER; note = 2'-O-methyluridine-3'-phosphorothioate
  modified_base 3: mod_base = OTHER; note = 2'-O-methyluridine-3'-phosphate
  modified_base 4: mod_base = OTHER; note = 2'-O-methylcytidine-3'-phosphate
  modified_base 5: mod_base = OTHER; note = 2'-O-methyladenosine-3'-phosphate
  modified_base 6: mod_base = OTHER; note = 2'-O-hexadecyl-uridine-3'-phosphate
  modified_base 7: mod_base = OTHER; note = 2'-O-methylguanosine-3'-phosphate
  modified_base 8: mod_base = OTHER; note = 2'-O-methyladenosine-3'-phosphate
  modified_base 9: mod_base = OTHER; note = 2'-fluorouridine-3'-phosphate
  modified_base 10: mod_base = OTHER; note = 2'-fluorocytidine-3'-phosphate
  modified_base 11: mod_base = OTHER; note = 2'-fluoroadenosine-3'-phosphate
  modified_base 12: mod_base = OTHER; note = 2'-O-methylcytidine-3'-phosphate
  modified_base 13: mod_base = OTHER; note = 2'-O-methylguanosine-3'-phosphate
  modified_base 14: mod_base = OTHER; note = 2'-O-methylguanosine-3'-phosphate
  modified_base 15: mod_base = OTHER; note = 2'-O-methyluridine-3'-phosphate
  modified_base 16: mod_base = OTHER; note = 2'-O-methylguanosine-3'-phosphate
  modified_base 17: mod_base = OTHER; note = 2'-O-methylguanosine-3'-phosphate
  modified_base 18: mod_base = OTHER; note = 2'-O-methyluridine-3'-phosphate
  modified_base 19: mod_base = OTHER; note = 2'-O-methyladenosine-3'- phosphorothioate
  modified_base 20: mod_base = OTHER; note = 2'-O-methylguanosine-3'- phosphorothioate
  modified_base 21: mod_base = OTHER; note = 2'-O-methyladenosine-3'-phosphate
gttcatgatcacggtggtaga

SEQ ID NO: 1727 - RNA, 21 nt, synthetic construct
  source 1..21: mol_type = other RNA
  modified_base 1: mod_base = OTHER; note = 2'-O-methyluridine-3'-phosphorothioate
  modified_base 2: mod_base = OTHER; note = 2'-O-methylguanosine-3'- phosphorothioate
  modified_base 3: mod_base = OTHER; note = 2'-O-methylguanosine-3'-phosphate
  modified_base 4: mod_base = OTHER; note = 2'-O-methyluridine-3'-phosphate
  modified_base 5: mod_base = OTHER; note = 2'-O-methylguanosine-3'-phosphate
  modified_base 6: mod_base = OTHER; note = 2'-O-hexadecyl-adenosine-3'-phosphate
  modified_base 7: mod_base = OTHER; note = 2'-fluorouridine-3'-phosphate
  modified_base 8: mod_base = OTHER; note = 2'-O-methyluridine-3'-phosphate
  modified_base 9: mod_base = OTHER; note = 2'-fluoroadenosine-3'-phosphate
  modified_base 10: mod_base = OTHER; note = 2'-fluoroadenosine-3'-phosphate
  modified_base 11: mod_base = OTHER; note = 2'-fluorouridine-3'-phosphate
  modified_base 12: mod_base = OTHER; note = 2'-O-methylguanosine-3'-phosphate
  modified_base 13: mod_base = OTHER; note = 2'-O-methyladenosine-3'-phosphate
  modified_base 14: mod_base = OTHER; note = 2'-O-methyladenosine-3'-phosphate
  modified_base 15: mod_base = OTHER; note = 2'-O-methyladenosine-3'-phosphate
  modified_base 16: mod_base = OTHER; note = 2'-O-methyluridine-3'-phosphate
  modified_base 17: mod_base = OTHER; note = 2'-O-methyluridine-3'-phosphate
  modified_base 18: mod_base = OTHER; note = 2'-O-methyladenosine-3'-phosphate
  modified_base 19: mod_base = OTHER; note = 2'-O-methyluridine-3'-phosphorothioate
  modified_base 20: mod_base = OTHER; note = 2'-O-methylcytidine-3'- phosphorothioate
  modified_base 21: mod_base = OTHER; note = 2'-O-methyladenosine-3'-phosphate
tggtgattaatgaaattatca

SEQ ID NO: 1728 - RNA, 21 nt, synthetic construct
  source 1..21: mol_type = other RNA
  modified_base 1: mod_base = OTHER; note = 2'-O-methyluridine-3'-phosphorothioate
  modified_base 2: mod_base = OTHER; note = 2'-O-methylguanosine-3'- phosphorothioate
  modified_base 3: mod_base = OTHER; note = 2'-O-methylguanosine-3'-phosphate
  modified_base 4: mod_base = OTHER; note = 2'-O-methyluridine-3'-phosphate
  modified_base 5: mod_base = OTHER; note = 2'-O-methylguanosine-3'-phosphate
  modified_base 6: mod_base = OTHER; note = 2'-O-hexadecyl-adenosine-3'-phosphate
  modified_base 7: mod_base = OTHER; note = 2'-O-methyluridine-3'-phosphate
  modified_base 8: mod_base = OTHER; note = 2'-O-methyluridine-3'-phosphate
  modified_base 9: mod_base = OTHER; note = 2'-fluoroadenosine-3'-phosphate
  modified_base 10: mod_base = OTHER; note = 2'-fluoroadenosine-3'-phosphate
  modified_base 11: mod_base = OTHER; note = 2'-fluorouridine-3'-phosphate
  modified_base 12: mod_base = OTHER; note = 2'-O-methylguanosine-3'-phosphate
  modified_base 13: mod_base = OTHER; note = 2'-O-methyladenosine-3'-phosphate
  modified_base 14: mod_base = OTHER; note = 2'-O-methyladenosine-3'-phosphate
  modified_base 15: mod_base = OTHER; note = 2'-O-methyladenosine-3'-phosphate
  modified_base 16: mod_base = OTHER; note = 2'-O-methyluridine-3'-phosphate
  modified_base 17: mod_base = OTHER; note = 2'-O-methyluridine-3'-phosphate
  modified_base 18: mod_base = OTHER; note = 2'-O-methyladenosine-3'-phosphate
  modified_base 19: mod_base = OTHER; note = 2'-O-methyluridine-3'-phosphorothioate
  modified_base 20: mod_base = OTHER; note = 2'-O-methylcytidine-3'- phosphorothioate
  modified_base 21: mod_base = OTHER; note = 2'-O-methyladenosine-3'-phosphate
tggtgattaatgaaattatca

SEQ ID NO: 1729 - RNA, 21 nt, synthetic construct
  source 1..21: mol_type = other RNA
  modified_base 1: mod_base = OTHER; note = 2'-O-methylguanosine-3'- phosphorothioate
  modified_base 2: mod_base = OTHER; note = 2'-O-methylguanosine-3'- phosphorothioate
  modified_base 3: mod_base = OTHER; note = 2'-O-methyladenosine-3'-phosphate
  modified_base 4: mod_base = OTHER; note = 2'-O-methylcytidine-3'-phosphate
  modified_base 5: mod_base = OTHER; note = 2'-O-methyladenosine-3'-phosphate
  modified_base 6: mod_base = OTHER; note = 2'-O-hexadecyl-uridine-3'-phosphate
  modified_base 7: mod_base = OTHER; note = 2'-fluorouridine-3'-phosphate
  modified_base 8: mod_base = OTHER; note = 2'-O-methyluridine-3'-phosphate
  modified_base 9: mod_base = OTHER; note = 2'-fluorocytidine-3'-phosphate
  modified_base 10: mod_base = OTHER; note = 2'-fluoroadenosine-3'-phosphate
  modified_base 11: mod_base = OTHER; note = 2'-fluorouridine-3'-phosphate
  modified_base 12: mod_base = OTHER; note = 2'-O-methyluridine-3'-phosphate
  modified_base 13: mod_base = OTHER; note = 2'-O-methyluridine-3'-phosphate
  modified_base 14: mod_base = OTHER; note = 2'-O-methyladenosine-3'-phosphate
  modified_base 15: mod_base = OTHER; note = 2'-O-methylguanosine-3'-phosphate
  modified_base 16: mod_base = OTHER; note = 2'-O-methyluridine-3'-phosphate
  modified_base 17: mod_base = OTHER; note = 2'-O-methyluridine-3'-phosphate
  modified_base 18: mod_base = OTHER; note = 2'-O-methylcytidine-3'-phosphate
  modified_base 19: mod_base = OTHER; note = 2'-O-methyladenosine-3'- phosphorothioate
  modified_base 20: mod_base = OTHER; note = 2'-O-methyluridine-3'-phosphorothioate
  modified_base 21: mod_base = OTHER; note = 2'-O-methyladenosine-3'-phosphate
ggacatttcatttagttcata

SEQ ID NO: 1730 - RNA, 21 nt, synthetic construct
  source 1..21: mol_type = other RNA
  modified_base 1: mod_base = OTHER; note = 2'-O-methylguanosine-3'- phosphorothioate
  modified_base 2: mod_base = OTHER; note = 2'-O-methylguanosine-3'- phosphorothioate
  modified_base 3: mod_base = OTHER; note = 2'-O-methyladenosine-3'-phosphate
  modified_base 4: mod_base = OTHER; note = 2'-O-methylcytidine-3'-phosphate
  modified_base 5: mod_base = OTHER; note = 2'-O-methyladenosine-3'-phosphate
  modified_base 6: mod_base = OTHER; note = 2'-O-hexadecyl-uridine-3'-phosphate
  modified_base 7: mod_base = OTHER; note = 2'-O-methyluridine-3'-phosphate
  modified_base 8: mod_base = OTHER; note = 2'-O-methyluridine-3'-phosphate
  modified_base 9: mod_base = OTHER; note = 2'-fluorocytidine-3'-phosphate
  modified_base 10: mod_base = OTHER; note = 2'-fluoroadenosine-3'-phosphate
  modified_base 11: mod_base = OTHER; note = 2'-fluorouridine-3'-phosphate
  modified_base 12: mod_base = OTHER; note = 2'-O-methyluridine-3'-phosphate
  modified_base 13: mod_base = OTHER; note = 2'-O-methyluridine-3'-phosphate
  modified_base 14: mod_base = OTHER; note = 2'-O-methyladenosine-3'-phosphate
  modified_base 15: mod_base = OTHER; note = 2'-O-methylguanosine-3'-phosphate
  modified_base 16: mod_base = OTHER; note = 2'-O-methyluridine-3'-phosphate
  modified_base 17: mod_base = OTHER; note = 2'-O-methyluridine-3'-phosphate
  modified_base 18: mod_base = OTHER; note = 2'-O-methylcytidine-3'-phosphate
  modified_base 19: mod_base = OTHER; note = 2'-O-methyladenosine-3'- phosphorothioate
  modified_base 20: mod_base = OTHER; note = 2'-O-methyluridine-3'-phosphorothioate
  modified_base 21: mod_base = OTHER; note = 2'-O-methyladenosine-3'-phosphate
ggacatttcatttagttcata

SEQ ID NO: 1731 - RNA, 21 nt, synthetic construct
  source 1..21: mol_type = other RNA
  modified_base 1: mod_base = OTHER; note = 2'-O-methylcytidine-3'- phosphorothioate
  modified_base 2: mod_base = OTHER; note = 2'-O-methyladenosine-3'- phosphorothioate
  modified_base 3: mod_base = OTHER; note = 2'-O-methyluridine-3'-phosphate
  modified_base 4: mod_base = OTHER; note = 2'-O-methyluridine-3'-phosphate
  modified_base 5: mod_base = OTHER; note = 2'-O-methyluridine-3'-phosphate
  modified_base 6: mod_base = OTHER; note = 2'-O-hexadecyl-adenosine-3'-phosphate
  modified_base 7: mod_base = OTHER; note = 2'-O-methylguanosine-3'-phosphate
  modified_base 8: mod_base = OTHER; note = 2'-O-methyluridine-3'-phosphate
  modified_base 9: mod_base = OTHER; note = 2'-fluorouridine-3'-phosphate
  modified_base 10: mod_base = OTHER; note = 2'-fluorocytidine-3'-phosphate
  modified_base 11: mod_base = OTHER; note = 2'-fluoroadenosine-3'-phosphate
  modified_base 12: mod_base = OTHER; note = 2'-O-methyluridine-3'-phosphate
  modified_base 13: mod_base = OTHER; note = 2'-O-methylguanosine-3'-phosphate
  modified_base 14: mod_base = OTHER; note = 2'-O-methyladenosine-3'-phosphate
  modified_base 15: mod_base = OTHER; note = 2'-O-methyluridine-3'-phosphate
  modified_base 16: mod_base = OTHER; note = 2'-O-methylcytidine-3'-phosphate
  modified_base 17: mod_base = OTHER; note = 2'-O-methyladenosine-3'-phosphate
  modified_base 18: mod_base = OTHER; note = 2'-O-methylcytidine-3'-phosphate
  modified_base 19: mod_base = OTHER; note = 2'-O-methylguanosine-3'- phosphorothioate
  modified_base 20: mod_base = OTHER; note = 2'-O-methylguanosine-3'- phosphorothioate
  modified_base 21: mod_base = OTHER; note = 2'-O-methyladenosine-3'-phosphate
catttagttcatgatcacgga

SEQ ID NO: 1732 - RNA, 21 nt, synthetic construct
  source 1..21: mol_type = other RNA
  modified_base 1: mod_base = OTHER; note = 2'-O-methylcytidine-3'- phosphorothioate
  modified_base 2: mod_base = OTHER; note = 2'-O-methyluridine-3'-phosphorothioate
  modified_base 3: mod_base = OTHER; note = 2'-O-methyladenosine-3'-phosphate
  modified_base 4: mod_base = OTHER; note = 2'-O-methylcytidine-3'-phosphate
  modified_base 5: mod_base = OTHER; note = 2'-O-methyladenosine-3'-phosphate
  modified_base 6: mod_base = OTHER; note = 2'-O-hexadecyl-uridine-3'-phosphate
  modified_base 7: mod_base = OTHER; note = 2'-fluorouridine-3'-phosphate
  modified_base 8: mod_base = OTHER; note = 2'-O-methylguanosine-3'-phosphate
  modified_base 9: mod_base = OTHER; note = 2'-fluorouridine-3'-phosphate
  modified_base 10: mod_base = OTHER; note = 2'-fluorocytidine-3'-phosphate
  modified_base 11: mod_base = OTHER; note = 2'-fluoroadenosine-3'-phosphate
  modified_base 12: mod_base = OTHER; note = 2'-O-methylguanosine-3'-phosphate
  modified_base 13: mod_base = OTHER; note = 2'-O-methylguanosine-3'-phosphate
  modified_base 14: mod_base = OTHER; note = 2'-O-methyladenosine-3'-phosphate
  modified_base 15: mod_base = OTHER; note = 2'-O-methylcytidine-3'-phosphate
  modified_base 16: mod_base = OTHER; note = 2'-O-methyladenosine-3'-phosphate
  modified_base 17: mod_base = OTHER; note = 2'-O-methyluridine-3'-phosphate
  modified_base 18: mod_base = OTHER; note = 2'-O-methyluridine-3'-phosphate
  modified_base 19: mod_base = OTHER; note = 2'-O-methyluridine-3'-phosphorothioate
  modified_base 20: mod_base = OTHER; note = 2'-O-methylcytidine-3'- phosphorothioate
  modified_base 21: mod_base = OTHER; note = 2'-O-methyladenosine-3'-phosphate
ctacattgtcaggacatttca

SEQ ID NO: 1733 - RNA, 21 nt, synthetic construct
  source 1..21: mol_type = other RNA
  modified_base 1: mod_base = OTHER; note = 2'-O-methyluridine-3'-phosphorothioate
  modified_base 2: mod_base = OTHER; note = 2'-O-methyluridine-3'-phosphorothioate
  modified_base 3: mod_base = OTHER; note = 2'-O-methylcytidine-3'-phosphate
  modified_base 4: mod_base = OTHER; note = 2'-O-methyladenosine-3'-phosphate
  modified_base 5: mod_base = OTHER; note = 2'-O-methyluridine-3'-phosphate
  modified_base 6: mod_base = OTHER; note = 2'-O-hexadecyl-uridine-3'-phosphate
  modified_base 7: mod_base = OTHER; note = 2'-fluorouridine-3'-phosphate
  modified_base 8: mod_base = OTHER; note = 2'-O-methyladenosine-3'-phosphate
  modified_base 9: mod_base = OTHER; note = 2'-fluoroguanosine-3'-phosphate
  modified_base 10: mod_base = OTHER; note = 2'-fluorouridine-3'-phosphate
  modified_base 11: mod_base = OTHER; note = 2'-fluorouridine-3'-phosphate
  modified_base 12: mod_base = OTHER; note = 2'-O-methylcytidine-3'-phosphate
  modified_base 13: mod_base = OTHER; note = 2'-O-methyladenosine-3'-phosphate
  modified_base 14: mod_base = OTHER; note = 2'-O-methyluridine-3'-phosphate
  modified_base 15: mod_base = OTHER; note = 2'-O-methylguanosine-3'-phosphate
  modified_base 16: mod_base = OTHER; note = 2'-O-methyladenosine-3'-phosphate
  modified_base 17: mod_base = OTHER; note = 2'-O-methyluridine-3'-phosphate
  modified_base 18: mod_base = OTHER; note = 2'-O-methylcytidine-3'-phosphate
  modified_base 19: mod_base = OTHER; note = 2'-O-methyladenosine-3'- phosphorothioate
  modified_base 20: mod_base = OTHER; note = 2'-O-methylcytidine-3'- phosphorothioate
  modified_base 21: mod_base = OTHER; note = 2'-O-methyladenosine-3'-phosphate
ttcatttagttcatgatcaca

SEQ ID NO: 1734 - RNA, 21 nt, synthetic construct
  source 1..21: mol_type = other RNA
  modified_base 1: mod_base = OTHER; note = 2'-O-methylguanosine-3'- phosphorothioate
  modified_base 2: mod_base = OTHER; note = 2'-O-methyluridine-3'-phosphorothioate
  modified_base 3: mod_base = OTHER; note = 2'-O-methylguanosine-3'-phosphate
  modified_base 4: mod_base = OTHER; note = 2'-O-methyladenosine-3'-phosphate
  modified_base 5: mod_base = OTHER; note = 2'-O-methyladenosine-3'-phosphate
  modified_base 6: mod_base = OTHER; note = 2'-O-hexadecyl-cytidine-3'-phosphate
  modified_base 7: mod_base = OTHER; note = 2'-fluorouridine-3'-phosphate
  modified_base 8: mod_base = OTHER; note = 2'-O-methyluridine-3'-phosphate
  modified_base 9: mod_base = OTHER; note = 2'-fluoroadenosine-3'-phosphate
  modified_base 10: mod_base = OTHER; note = 2'-fluorocytidine-3'-phosphate
  modified_base 11: mod_base = OTHER; note = 2'-fluoroguanosine-3'-phosphate
  modified_base 12: mod_base = OTHER; note = 2'-O-methyluridine-3'-phosphate
  modified_base 13: mod_base = OTHER; note = 2'-O-methylguanosine-3'-phosphate
  modified_base 14: mod_base = OTHER; note = 2'-O-methylguanosine-3'-phosphate
  modified_base 15: mod_base = OTHER; note = 2'-O-methyluridine-3'-phosphate
  modified_base 16: mod_base = OTHER; note = 2'-O-methylguanosine-3'-phosphate
  modified_base 17: mod_base = OTHER; note = 2'-O-methyladenosine-3'-phosphate
  modified_base 18: mod_base = OTHER; note = 2'-O-methyluridine-3'-phosphate
  modified_base 19: mod_base = OTHER; note = 2'-O-methyluridine-3'-phosphorothioate
  modified_base 20: mod_base = OTHER; note = 2'-O-methyladenosine-3'- phosphorothioate
  modified_base 21: mod_base = OTHER; note = 2'-O-methyladenosine-3'-phosphate
gtgaacttacgtggtgattaa

SEQ ID NO: 1735 - protein, 16 aa, unidentified
AAVALLPAVLLALLAP

SEQ ID NO: 1736 - protein, 11 aa, unidentified
AALLPVLLAAP

1. A double stranded ribonucleic acid (dsRNA) agent for inhibiting expression of Huntingtin (HTT) in a cell, wherein the dsRNA comprises a sense strand and an antisense strand forming a double stranded region, wherein the antisense strand comprises a region of complementarity to intron 1 retained in mutant HTT mRNA, and wherein the region of complementarity comprises at least 15 contiguous nucleotides differing by no more than 3 nucleotides from any one of the antisense nucleotide sequences in any one of Tables 2-3 and 5-6.

2. The dsRNA agent of claim 1, wherein the sense strand comprises at least 15 contiguous nucleotides differing by no more than three nucleotides from any one of the nucleotide sequence of nucleotides 5790-5810; 5791-5811; 5924-5944; 5925-5945; 5998-6018; 6063-6083; 6064-6084; 6194-6214; 6195-6215; 6211-6231, 5922-5944, 6059-6106 6059-6084 6068-6092 6076-6106 6191-6231 6191-6215 6191-6214; 6192-6215 6198-6231; or 6198-6224 of SEQ ID NO:11.

3-5. (canceled)

6. A double stranded ribonucleic acid (dsRNA) agent for inhibiting expression of Huntingtin (HTT) in a cell, wherein the dsRNA comprises a sense strand and an antisense strand forming a double stranded region, wherein the antisense strand comprises at least 15 contiguous nucleotides differing by no more than three nucleotides from any one of the antisense strand nucleotide sequences of a duplex selected from the group consisting of AD-1718647; AD-1718648; AD-1718649; AD-1718653; AD-1718654 AD-1718655; AD-1718656; AD-1718660; AD-1718662; AD-1718663; AD-1718669; AD-1718670; AD-1718673; AD-1718674; AD-1718676; AD-1718677; AD-1718678; AD-1718679; AD-1718680; AD-1718682; AD-1718683; AD-1718702; AD-1718715; AD-1718717; or AD-1718721.

7-10. (canceled)

11. The dsRNA agent of claim 1, wherein the sense strand, the antisense strand, or both the sense strand and the antisense strand is conjugated to one or more lipophilic moieties.

12. The dsRNA agent of claim 11, wherein the lipophilic moiety is conjugated to one or more internal positions in the double stranded region of the dsRNA agent.

13-25. (canceled)

26. The dsRNA agent of claim 11, wherein the one or more lipophilic moieties are conjugated to one or more of the internal positions selected from the group consisting of positions 4-8 and 13-18 on the sense strand, and positions 6-10 and 15-18 on the antisense strand, counting from the 5′-end of each strand.

27-33. (canceled)

34. The dsRNA agent of claim 11, wherein the lipophilic moiety contains a saturated or unsaturated C6-C18 hydrocarbon chain.

35-39. (canceled)

40. The dsRNA agent of claim 1, wherein the lipophilic moiety is conjugated to a nucleobase, sugar moiety, or internucleosidic linkage.

41. The dsRNA agent of claim 1, wherein at least one nucleotide of the dsRNA agent comprises a nucleotide modification.

42. (canceled)

43. The dsRNA agent of claim 41, wherein all of the nucleotides of the sense strand and all of the nucleotides of the antisense strand comprise a nucleotide modification.

44. The dsRNA agent of claim 41, wherein at least one of the nucleotide modifications is selected from the group a deoxy-nucleotide modification, a 3′-terminal deoxy-thymine (dT) nucleotide modification, a 2′-O-methyl nucleotide modification, a 2′-fluoro nucleotide modification, a 2′-deoxy nucleotide modification, a 2′-5′-linked ribonucleotide (3′-RNA) modification, a locked nucleotide modification, an unlocked nucleotide modification, a conformationally restricted nucleotide modification, a constrained ethyl nucleotide modification, an abasic nucleotide modification, a 2′-amino nucleotide modification, a 2′-O-allyl nucleotide modification, 2′-C-alkyl nucleotide modification, 2′-hydroxly nucleotide modification, a 2′-methoxyethyl nucleotide modification, a 2′-O-alkyl nucleotide modification, a morpholino nucleotide modification, a phosphoramidate modification, a non-natural base comprising nucleotide modification, a tetrahydropyran nucleotide modification, a 1,5-anhydrohexitol nucleotide modification, a cyclohexenyl nucleotide modification, a nucleotide comprising a 5′-phosphorothioate group modification, a nucleotide comprising a 5′-methylphosphonate group modification, a nucleotide comprising a 5′ phosphate or 5′ phosphate mimic modification, a nucleotide comprising vinyl phosphonate modification, a nucleotide comprising adenosine-glycol nucleic acid (GNA) modification, a glycol nucleic acid S-Isomer (S-GNA) modification, a nucleotide comprising 2-hydroxymethyl-tetrahydrofurane-5-phosphate modification, a nucleotide comprising 2′-deoxythymidine-3′phosphate modification, a nucleotide comprising 2′-deoxyguanosine-3′-phosphate modification, and a terminal nucleotide linked to a cholesteryl derivative modification, a dodecanoic acid bisdecylamide group modification; an acytidine-2′-phosphate modification, a guanosine-2′-phosphate modification, a uridine-2′-phosphate modification, a adenosine-2′-phosphate modification, a 2′-O-hexadecyl-adenosine-3′-phosphate modification, a 2′-O-hexadecyl-cytidine-3′-phosphate modification, a 2′-O-hexadecyl-guanosine-3′-phosphate modification, and a 2′-O-hexadecyl-uridine-3′-phosphate modification, and combinations thereof.

45-72. (canceled)

73. The dsRNA agent of claim 1, further comprising at least one phosphorothioate internucleotide linkage.

74. (canceled)

75. The dsRNA agent of claim 1, wherein each strand is no more than 30 nucleotides in length.

76. The dsRNA agent of claim 1, wherein at least one strand comprises a 3′ overhang of at least 1 nucleotide.

77. (canceled)

78. The dsRNA agent of claim 1, wherein the double stranded region is 15-30 nucleotide pairs in length.

79-95. (canceled)

96. The dsRNA agent of claim 1, further comprising a phosphate or phosphate mimic at the 5′-end of the antisense strand.

97-99. (canceled)

100. A cell containing the dsRNA agent of claim 1.

101. A pharmaceutical composition for inhibiting expression of a gene encoding HTT, comprising the dsRNA agent of claim 1.

102. (canceled)

103. A method of inhibiting expression of a huntingtin (HTT) gene in a cell, the method comprising:
(a) contacting the cell with the dsRNA agent of claim 1; and
(b) maintaining the cell produced in step (a) for a time sufficient to obtain degradation of the mRNA transcript of the HTT gene, thereby inhibiting expression of the HTT gene in the cell.

104-108. (canceled)

109. A method of treating a subject diagnosed with an HTT-associated disease, the method comprising administering to the subject a therapeutically effective amount of the dsRNA agent of claim 1, thereby treating the subject.

110-117. (canceled)
